(19) United States
(12) Patent Application Publication
(10) Pub. No.: US 2020/0362054 A1
(43) Pub. Date: Nov. 19, 2020

(54) TRISPECIFIC BINDING MOLECULES AGAINST TUMOR-ASSOCIATED ANTIGENTS AND USE THEREOF

(71) Applicants: Brian GRANDA, Salisbury, MA (US); Connie HONG, Somerville, MA (US); Melissa RAMONES, West Roxbury, MA (US); Darko SKEGRO, Grenchen (CH)

(72) Inventors: Brian GRANDA, Salisbury, MA (US); Connie HONG, Somerville, MA (US); Melissa RAMONES, West Roxbury, MA (US); Darko SKEGRO, Grenchen (CH)

(21) Appl. No.: 16/765,830

(22) PCT Filed: Nov. 20, 2018
(86) PCT No.: PCT/US2018/062078

§ 371 Date: May 20, 2020

Related U.S. Application Data
(60) Provisional application No. 62/589,331, filed on Nov. 21, 2017.

(51) Int. Cl. C07K 16/30; C07K 16/28; A61P 35/00

(52) U.S. Cl. CPC C07K 16/30; C07K 16/2806; C07K 16/2809; C07K 2317/31; C07K 2317/55; C07K 2317/569; C07K 2317/64; A61P 35/00

(57) ABSTRACT

The present disclosure provides trispecific binding molecules that specifically bind to CD2, CD3 and a tumor-associated antigen, conjugates comprising the trispecific binding molecules, and pharmaceutical compositions comprising the trispecific binding molecules and the conjugates. The disclosure further provides methods of using the trispecific binding molecules to treat cancers that express the tumor-associated antigens. The disclosure yet further provides recombinant host cells engineered to express the trispecific binding molecules and methods of producing the trispecific binding molecules by culturing the host cells under conditions in which the trispecific binding molecules are expressed.

### 1. CROSS-REFERENCE TO RELATED APPLICATIONS

[0001] This application claims the priority benefit of U.S. provisional application No. 62/589,331, filed Nov. 21, 2017, the contents of which are incorporated herein in their entireties by reference thereto.

### 2. SEQUENCE LISTING

[0002] The instant application contains a Sequence Listing which has been submitted electronically in ASCII format and is hereby incorporated by reference in its entirety. Said ASCII copy, created on Nov. 19, 2018, is named NOV-001WO_SL.txt and is 592,187 bytes in size.

### 3. BACKGROUND

[0003] Redirected targeted T-cell lysis (RTCC) is an exciting mechanism for first line treatment and refractory settings. Antibodies and antibody fragments with their exquisite selectivity have been successfully engineered in a variety of formats to allow for the dual specificities required tso cross-link T-cells to a single receptor on the target cell.

[0004] First line treatments for some indications or the indications themselves may promote immune suppressive environments to promote T-cell anergy, reducing the efficacy of existing RTCC therapies. Acute myeloid lymphoma, for example, has been shown to be a particularly evasive disease in the context of avoid immune surveillance (Teague and Klein, 2013, Journal for ImmunoTherapy of Cancer 1:13). The solid tumor micro-environment can also provide mechanisms of escape and promote survival of tumor cells through a variety of pathways (Vaney et al., 2015, Seminars in Cancer Biology 35:S151-S184).

[0005] Therefore, there is a need for improved RTCC approaches.

### 4. SUMMARY

[0006] The present disclosure extends the principles of RTCC by providing mutispecific binding molecules that engage a tumor-associated antigen (“TAA”) and CD2 in addition to CD3 or other component of a TCR complex on T-cells.

[0007] The present invention is based, at least in part, on the finding that engaging CD2 in addition to a component of a TCR complex will improve the clinical outcomes of RTCC therapy by activating T cell subpopulations that would be refractory to stimulation using bispecific engagers that target only a TAA and a TCR complex. As shown in the Examples, the outcome of treating tumors with trispecific binding molecules that engage a TAA, CD2 and CD3 results in improved anti-tumor activity as compared to engaging the TAA and CD3 only, particularly in the presence of anergic T-cells. Without being bound by theory, the inventors believe that combining CD2- and TCR complex-engagement in a single multispecific molecule can stimulate both a primary signaling pathway that promotes T-cell mediated lysis of tumor cells (by clustering TCRs, for example) and a second co-stimulatory pathway to induce T-cell proliferation and potentially overcome anergy.

[0008] Accordingly, the present disclosure provides trispecific binding molecules (“TBMs”) that bind to (1) a tumor-associated antigen (“TAA”), (2) CD2, and (3) CD3 or other component of a TCR complex. The TBMs comprise at least three antigen-binding modules (“ABMs”) that can bind TAA, CD2 and a component of a TCR complex. In some embodiments, each antigen-binding module is capable of binding its respective target at the same time as each of the other antigen-binding modules is bound to its respective target. Each ABM may be immunoglobulin- or non-immunoglobulin-based, and therefore the TBMs of the disclosure can include immunoglobulin-based ABMs, non-immunoglobulin-based ABMs, or a combination thereof. Immunoglobulin-based ABMs that can be used in the TBMs of the disclosure are described in Section 6.2.1 and specific embodiments 31 to 406, 575 to 583, 591 to 660, 662 to 667, 671, 673 to 762 and 830 to 898, infra. Non-immunoglobulin-based ABMs that can be used in the TBMs of the disclosure are described in Section 6.2.2 and specific embodiments 2 to 30, 403 to 406 and 584 to 589, infra. Further features of exemplary ABMs that bind to a component of a TCR complex are described in Section 6.5 and specific embodiments 38 to 106, 590 to 667, and 1045, infra. Further features of exemplary ABMs that bind to CD2 are described in Section 6.6 and specific embodiments 2 to 37, 403 to 406, 575 to 589, and 1044, infra. Further features of exemplary ABMs that bind to TAAs are described in Section 6.7 and specific embodiments 107 to 276, 346 to 406, 668 to 762, and 1046 infra.

[0009] The ABMs of a TBM of the disclosure (or portions thereof) can be connected to each other, for example, by short peptide linkers or by an Fc domain. Methods and components for connecting ABMs to form a TBM are described in Section 6.3 and specific embodiments 401 to 453, 763 to 829 and 899 to 957, infra.

[0010] TBMs of the disclosure have at least three ABMs (i.e., a TBM is at least trivalent), but can also have more than three ABMs. For example, a TBM can have four ABMs (i.e., is tetravalent), five ABMs (i.e., is pentavalent), or six ABMs (i.e., is hexavalent), provided that the TBM has at least one ABM that can bind a TAA, at least one ABM that can bind CD2, and at least one ABM that can bind a component of a TCR complex. Exemplary trivalent, tetravalent, pentavalent, and hexavalent TBM configurations are shown in FIG. 1 and described in Section 6.4 and specific embodiments 958 to 1042, infra.

[0011] The disclosure further provides nucleic acids encoding the TBMs of the disclosure (either in a single nucleic acid or a plurality of nucleic acids) and recombinant host cells and cell lines engineered to express the nucleic acids and TBMs of the disclosure. Exemplary nucleic acids, host cells, and cell lines are described in Section 6.8 and specific embodiments 570 to 573 and 1169 to 1176, infra.

[0012] The present disclosure further provides drug conjugates comprising the TBMs of the disclosure. Such conjugates are referred to herein as “antibody-drug conjugates” or “ADCs” for convenience, notwithstanding that some or all of the ABMs can be non-immunoglobulin domains. Examples of ADCs are described in Section 6.9 and specific embodiments 469 to 507 and 1054 to 1093, infra.

[0013] The present disclosure further provides preparations comprising a TBM or conjugate of the disclosure. Examples of preparations are described in Section 6.10 and specific embodiments 508 to 565 and 1094 to 1151, infra.

[0014] Pharmaceutical compositions comprising the TBMs and ADCs of the disclosure are also provided. Examples of pharmaceutical compositions are described in Section 6.11 and specific embodiments 566 and 1152, infra.

[0015] Further provided herein are methods of using the TBMs, the ADCs, and the pharmaceutical compositions of the disclosure, for example for treating proliferative conditions (e.g., cancers), on which the TAAs are expressed. Exemplary methods are described in Section 6.12 and specific embodiments 567 to 568 and 1153 to 1155, infra.

[0016] The disclosure further provides methods of using the TBMs, the ADCs, and the pharmaceutical compositions of the disclosure in combination with other agents and therapies. Exemplary agents, therapies, and methods of combination therapy are described in Section 6.13 and specific embodiments 569 and 1156 to 1168, infra.

### 5. BRIEF DESCRIPTION OF THE FIGURES

[0017] FIGS. 1A-1U: Exemplary TBM configurations. FIG. 1A illustrates components of the exemplary TBM configurations illustrated in FIGS. 1B-1Z. Not all regions connecting the different domains of each chain are illustrated (e.g., the linker connecting the VH and VL domains of an scFv, the hinge connecting the CH2 and CH3 domains of an Fc, etc., are omitted). FIGS. 1B-1O and 1V-Z illustrate trivalent TBMs; FIGS. 1P-1R illustrate tetravalent TBMs; FIG. 1S illustrates a pentavalent TBM, and FIGS. 1T-1U illustrate hexavalent TBMs.

[0018] FIG. 2: Schematics of the bispecific and trispecific constructs of Example 1.

[0019] FIGS. 3A-3D: Results of a re-directed T cell cytotoxicity assay using human CD-19-expressing Nalm6 target cells and a bispecific construct targeting human CD3 and human growth hormone, a bispecific construct targeting human CD3 and human CD19, and a TBM targeting human CD3, human CD2 and human CD19. FIG. 3A-3B: results obtained using pan T effector cells from a first donor after 24 hour (FIG. 3A) and 48 hour (FIG. 3B) incubations. FIG. 3C-3D: results obtained using pan T effector cells from a second donor after 24 hour (FIG. 3C) and 48 hour (FIG. 3D) incubations.

[0020] FIGS. 4A-4B: Results of a re-directed T cell cytotoxicity assay using human CD-19-expressing Daudi target cells and a bispecific construct targeting human CD3 and human growth hormone, a bispecific construct targeting human CD3 and human CD19, and a TBM targeting human CD3, human CD2 and human CD19. FIG. 4A: results obtained using pan T effector cells from a first donor after a 48-hour incubation. FIG. 4B: results obtained using pan T effector cells from a second donor after a-48 hour incubation.

[0021] FIG. 5: Results of a re-directed T cell cytotoxicity assay using negative control human K562 target cells and a bispecific construct targeting human CD3 and human growth hormone, a bispecific construct targeting human CD3 and human CD19, and a TBM targeting human CD3, human CD2 and human CD19.

[0022] FIG. 6A-6E: Results of a re-directed T cell cytotoxicity assay using human CD-19-expressing Nalm6 target cells and a bispecific construct targeting human CD3 and human growth hormone, a bispecific construct targeting human CD3 and human CD19, and a TBM targeting human CD3, human CD2 and human CD19. FIG. 6A-6E show results obtained using pan T effector cells from five different donors.

[0023] FIG. 7: Results of a re-directed T cell cytotoxicity assay using human CD-19-expressing Nalm6 target cells and a bispecific construct targeting human CD3 and human growth hormone, a bispecific construct targeting human CD3 and human CD19, and a TBM targeting human CD3, human CD2 and human CD19. FIG. 7 shows results obtained using human cryopreserved PBMCs from a patient diagnosed with acute myeloid leukemia.

[0024] FIGS. 8A-8D: Results of a re-directed T cell cytotoxicity assay using human CD-19-expressing Nalm6 target cells and a bispecific construct targeting human CD3 and human growth hormone, a bispecific construct targeting human CD3 and human CD19, and a TBM targeting human CD3, human CD2 and human CD19. FIG. 8A-8D show results obtained from target cell rechallenges at 48 hours, 72 hours, 96 hours, and 120 hours, respectively.

[0025] FIG. 9A-9B: Cell proliferation assay results. CD4+ sorted cells are shown in FIG. 9A and CD8+ sorted cells are shown in FIG. 9B.

[0026] FIGS. 10A-10F: Results of a cytokine release assay using human CD-19-expressing Nalm6 target cells and a bispecific construct targeting human CD3 and human growth hormone, a bispecific construct targeting human CD3 and human CD19, and a TBM targeting human CD3, human CD2 and human CD19. FIG. 10A: IFNγ; FIG. 10B: TNFα; FIG. 10C: IL2; FIG. 10D: IL10; FIG. 10E: IL6; FIG. 10F: figure legend.

[0027] FIG. 11: Results of a granzyme B ELISpot assay using human CD-19-expressing Nalm6 target cells and a bispecific construct targeting human CD3 and human growth hormone, a bispecific construct targeting human CD3 and human CD19, and a TBM targeting human CD3, human CD2 and human CD19.

[0028] FIGS. 12A-C: Schematics of the trispecific constructs of Example 2. FIG. 12A: AB2-1;

[0029] FIG. 12B: AB2-2; FIG. 12C: AB2-3.

[0030] FIG. 13: Results of a re-directed T cell cytotoxicity assay using human CD-19-expressing Nalm6 target cells and TBMs targeting human CD3, human CD2 and human CD19 (Example 2).

[0031] FIG. 14: Results of a re-directed T cell cytotoxicity assay using human CD-19-expressing Nalm6 target cells and and a bispecific construct targeting human CD3 and human growth hormone, a bispecific construct targeting human CD3 and human CD19, and a TBM targeting human CD3, human CD2 and human CD19 (Example 2). FIG. 14 shows results obtained using cynomolgus monkey pan T effector cells.

[0032] FIG. 15: Results of a NFAT activation assay using TBMs targeting human CD3, human CD2 and human CD19 (Example 2).

[0033] FIGS. 16A-E: Schematics of the trispecific constructs of Example 3. FIG. 16A: AB3-1;

[0034] FIG. 16B: AB3-2; FIG. 16C: AB3-3; FIG. 16D: AB3-4; FIG. 16E: AB3-5.

[0035] FIG. 17: Results of a re-directed T cell cytotoxicity assay using human CD-19-expressing Nalm6 target cells and TBMs targeting human CD3, human CD2 and human CD19 (Example 3).

[0036] FIG. 18: Results of a NFAT activation assay using TBMs targeting human CD3, human CD2 and human CD19 (Example 3).

[0037] FIGS. 19A-C: Schematics of the trispecific constructs of Example 4. FIG. 19A: AB4-1;

[0038] FIG. 19B: AB4-2; FIG. 19C: AB4-3.

[0039] FIG. 20: Results of a re-directed T cell cytotoxicity assay using human CD-19-expressing Nalm6 target cells and TBMs targeting human CD3, human CD2 and human CD19 (Example 4).

[0040] FIG. 21: Results of a NFAT activation assay using TBMs targeting human CD3, human CD2 and human CD19 (Example 4).

[0041] FIGS. 22A-22D: Results of a cytokine release assay using TBMs targeting human CD3, human CD2 and human CD19 (Example 4). FIG. 22A: IL-2; FIG. 22B: TNFα; FIG. 22C: IFNγ;

[0042] FIG. 22D: figure legend

[0043] FIGS. 23A-23B: Schematics of the bispecific and trispecfic constructs of Example 5. FIG. 23A: bispecific construct; FIG. 23B: trispecfic construct.

[0044] FIG. 24: Results of a re-directed T cell cytotoxicity assay using human CD-19-expressing Nalm6 target cells and either bispecific constructs targeting human CD3 and human CD19 or TBMs targeting human CD3, human CD2 and human CD19 (Example 5).

[0045] FIGS. 25A-25B: Results of a cytokine release assay using human CD-19-expressing Nalm6 target cells and bispecific constructs targeting human CD3 and human CD19, and TBMs targeting human CD3, human CD2 and human CD19 (Example 5). FIG. 25A shows show results for constructs having CD3 binding arms corresponding to BMA031 and FIG. 25B shows results for constructs having CD3 binding arms corresponding to OKT3. Results for trispecific constructs are are shown in black; results for bispecific constructs are shown in gray.

[0046] FIGS. 26A-26B: Schematics of the bispecific and trispecfic constructs of Example 6. FIG. 26A: bispecific construct; FIG. 26B: trispecfic construct.

[0047] FIG. 27: Results of a re-directed T cell cytotoxicity assay using human Her2-expressing HCC1954 target cells and a bispecific construct targeting human CD3 and human Her2 or a TBM targeting human CD3, human CD2 and human Her2 (Example 6).

[0048] FIG. 28: Results of a cytokine release assay using human Her2-expressing HCC1954 target cells and a bispecific construct targeting human CD3 and human Her2, and TBMs targeting human CD3, human CD2 and either human Her2 or GH (Example 6).

[0049] FIGS. 29A-B: Schematics of the bispecific and trispecfic constructs of Example 7. FIG. 29A: bispecific construct; FIG. 29B: trispecfic construct.

[0050] FIG. 30: Results of a re-directed T cell cytotoxicity assay using human mesothelin-expressing OVCAR8 target cells and a bispecific construct targeting human CD3 and human mesothelin or a TBM targeting human CD3, human CD2 and human mesothelin (Example 7).

[0051] FIG. 31: Results of a cytokine release assay using human Mesothelin-expressing Ovcar8 target cells and a bispecific construct targeting human CD3 and human mesothelin (MSLN), and TBMs targeting human CD3, human CD2 and either human mesothelin or GH (Example 6).

[0052] FIG. 32: Schematics of the trispecfic construct of Example 8.

### 6. DETAILED DESCRIPTION

### 6.1. Definitions

[0053] As used herein, the following terms are intended to have the following meanings:

[0054] Antigen-binding module: The term “antigen-binding module” or “ABM” as used herein refers to a portion of a TBM of the disclosure that has the ability to bind to an antigen non-covalently, reversibly and specifically. An ABM may be immunoglobulin- or non-immunoglobulin-based. As used herein, the terms “ABM1” and “CD2 ABM” (and the like) refers to an ABM that binds specifically to CD2, the terms “ABM2” and “TCR ABM” (and the like) refers to an ABM that binds specifically to a component of a TCR complex, and the term “ABM3” and “TAA ABM” (and the like) refer to an ABM that binds specifically to a tumor-associated antigen. The terms ABM1, ABM2, and ABM3 are used merely for convenience and are not intended to convey any particular configuration of a TBM. In some embodiments, a TCR ABM binds to CD3 (referred to herein a “CD3 ABM” or the like). Accordingly, disclosures relating to ABM2 and TCR ABMs are also applicable to CD3 ABMs.

[0055] Antibody: The term “antibody” as used herein refers to a polypeptide (or set of polypeptides) of the immunoglobulin family that is capable of binding an antigen non-covalently, reversibly and specifically. For example, a naturally occurring “antibody” of the IgG type is a tetramer comprising at least two heavy (H) chains and two light (L) chains inter-connected by disulfide bonds. Each heavy chain is comprised of a heavy chain variable region (abbreviated herein as VH) and a heavy chain constant region. The heavy chain constant region is comprised of three domains, CH1, CH2 and CH3. Each light chain is comprised of a light chain variable region (abbreviated herein as VL) and a light chain constant region. The light chain constant region is comprised of one domain (abbreviated herein as CL). The VH and VL regions can be further subdivided into regions of hypervariability, termed complementarity determining regions (CDR), interspersed with regions that are more conserved, termed framework regions (FR). Each VH and VL is composed of three CDRs and four FRs arranged from amino-terminus to carboxy-terminus in the following order: FR1, CDR1, FR2, CDR2, FR3, CDR3, FR4. The variable regions of the heavy and light chains contain a binding domain that interacts with an antigen. The constant regions of the antibodies may mediate the binding of the immunoglobulin to host tissues or factors, including various cells of the immune system (e.g., effector cells) and the first component (C1q) of the classical complement system. The term “antibody” includes, but is not limited to, monoclonal antibodies, human antibodies, humanized antibodies, camelised antibodies, chimeric antibodies, bispecific or multispecific antibodies and anti-idiotypic (anti-Id) antibodies (including, e.g., anti-Id antibodies to antibodies of the disclosure). The antibodies can be of any isotype/class (e.g., IgG, IgE, IgM, IgD, IgA and IgY) or subclass (e.g., IgG1, IgG2, IgG3, IgG4, IgA1 and IgA2).

[0056] Both the light and heavy chains are divided into regions of structural and functional homology. The terms “constant” and “variable” are used functionally. In this regard, it will be appreciated that the variable domains of both the light (VL) and heavy (VH) chain portions determine antigen recognition and specificity. Conversely, the constant domains of the light chain (CL) and the heavy chain (CH1, CH2 or CH3) confer important biological properties such as secretion, transplacental mobility, Fc receptor binding, complement binding, and the like. By convention the numbering of the constant region domains increases as they become more distal from the antigen-binding site or amino-terminus of the antibody. The N-terminus is a variable region and at the C-terminus is a constant region; the CH3 and CL domains actually comprise the carboxy-terminus of the heavy and light chain, respectively.

[0057] Antibody fragment: The term “antibody fragment” of an antibody as used herein refers to one or more portions of an antibody. In some embodiments, these portions are part of the contact domain(s) of an antibody. In some other embodiments, these portion(s) are antigen-binding fragments that retain the ability of binding an antigen non-covalently, reversibly and specifically, sometimes referred to herein as the “antigen-binding fragment”, “antigen-binding fragment thereof,” “antigen-binding portion”, and the like. Examples of binding fragments include, but are not limited to, single-chain Fvs (scFv), a Fab fragment, a monovalent fragment consisting of the VL, VH, CL and CH1 domains; a F(ab)2 fragment, a bivalent fragment comprising two Fab fragments linked by a disulfide bridge at the hinge region; a Fd fragment consisting of the VH and CH1 domains; a Fv fragment consisting of the VL and VH domains of a single arm of an antibody; a dAb fragment (Ward et al., (1989) Nature 341:544-546), which consists of a VH domain; and an isolated complementarity determining region (CDR). Thus, the term “antibody fragment” encompasses both proteolytic fragments of antibodies (e.g., Fab and F(ab)2 fragments) and engineered proteins comprising one or more portions of an antibody (e.g., an scFv).

[0058] Antibody fragments can also be incorporated into single domain antibodies, maxibodies, minibodies, intrabodies, diabodies, triabodies, tetrabodies, v-NAR and bis-scFv (see, e.g., Hollinger and Hudson, 2005, Nature Biotechnology 23: 1126-1136). Antibody fragments can be grafted into scaffolds based on polypeptides such as Fibronectin type III (Fn3) (see U.S. Pat. No. 6,703,199, which describes fibronectin polypeptide monobodies).

[0059] Antibody fragments can be incorporated into single chain molecules comprising a pair of tandem Fv segments (for example, VH-CH1-VH-CH1) which, together with complementary light chain polypeptides (for example, VL-VC-VL-VC), form a pair of antigen-binding regions (Zapata et al., 1995, Protein Eng. 8:1057-1062; and U.S. Pat. No. 5,641,870).

[0060] Antigen-binding domain: The term “antigen-binding domain” refers a portion of a molecule that has the ability to bind to an antigen non-covalently, reversibly and specifically. Exemplary antigen-binding domains include antigen-binding fragments and portions of both immunoglobulin and non-immunoglobulin based scaffolds that retain the ability of binding an antigen non-covalently, reversibly and specifically. As used herein, the term “antigen-binding domain” encompasses antibody fragments that retain the ability of binding an antigen non-covalently, reversibly and specifically.

[0061] Half Antibody: The term “half antibody” refers to a molecule that comprises at least one ABM or ABM chain and can associate with another molecule comprising an ABM or ABM chain through, e.g., a disulfide bridge or molecular interactions (e.g., knob-in-hole interactions between Fc heterodimers). A half antibody can be composed of one polypeptide chain or more than one polypeptide chains (e.g., the two polypeptide chains of a Fab). In a preferred embodiment, a half-antibody comprises an Fc region.

[0062] An example of a half antibody is a molecule comprising a heavy and light chain of an antibody (e.g., an IgG antibody). Another example of a half antibody is a molecule comprising a first polypeptide comprising a VL domain and a CL domain, and a second polypeptide comprising a VH domain, a CH1 domain, a hinge domain, a CH2 domain, and a CH3 domain, wherein said VL and VH domains form an ABM. Yet another example of a half antibody is a polypeptide comprising an scFv domain, a CH2 domain and a CH3 domain.

[0063] A half antibody might include more than one ABM, for example a half-antibody comprising (in N- to C-terminal order) an scFv domain, a CH2 domain, a CH3 domain, and another scFv domain.

[0064] Half antibodies might also include an ABM chain that when associated with another ABM chain in another half antibody forms a complete ABM.

[0065] Thus, a TBM can comprise one, more typically two, or even more than two half antibodies, and a half antibody can comprise one or more ABMs or ABM chains.

[0066] In some TBMs, a first half antibody will associate, e.g., heterodimerize, with a second half antibody. In other TBMs, a first half antibody will be covalently linked to a second half antibody, for example through disulfide bridges or chemical crosslinking. In yet other TBMs, a first half antibody will associate with a second half antibody through both covalent attachments and non-covalent interactions, for example disulfide bridges and knob-in-hole interactions.

[0067] The term “half antibody” is intended for descriptive purposes only and does not connote a particular configuration or method of production. Descriptions of a half antibody as a “first” half antibody, a “second” half antibody, a “left” half antibody, a “right” half antibody or the like are merely for convenience and descriptive purposes.

[0068] Complementarity Determining Region: The terms “complementarity determining region” or “CDR,” as used herein, refer to the sequences of amino acids within antibody variable regions which confer antigen specificity and binding affinity. For example, in general, there are three CDRs in each heavy chain variable region (e.g., CDR-H1, CDR-H2, and CDR-H3) and three CDRs in each light chain variable region (CDR-L1, CDR-L2, and CDR-L3). The precise amino acid sequence boundaries of a given CDR can be determined using any of a number of well-known schemes, including those described by Kabat et al., 1991, “Sequences of Proteins of Immunological Interest,” 5th Ed. Public Health Service, National Institutes of Health, Bethesda, Md. (“Kabat” numbering scheme), Al-Lazikani et al., 1997, JMB 273:927-948 (“Chothia” numbering scheme) and ImMunoGenTics (IMGT) numbering (Lefranc, 1999, The Immunologist 7:132-136 (1999); Lefranc et al., 2003, Dev. Comp. Immunol. 27:55-77 (“IMGT” numbering scheme). For example, for classic formats, under Kabat, the CDR amino acid residues in the heavy chain variable domain (VH) are numbered 31-35 (CDR-H1), 50-65 (CDR-H2), and 95-102 (CDR-H3); and the CDR amino acid residues in the light chain variable domain (VL) are numbered 24-34 (CDR-L1), 50-56 (CDR-L2), and 89-97 (CDR-L3). Under Chothia, the CDR amino acids in the VH are numbered 26-32 (CDR-H1), 52-56 (CDR-H2), and 95-102 (CDR-H3); and the amino acid residues in VL are numbered 26-32 (CDR-L1), 50-52 (CDR-L2), and 91-96 (CDR-L3). By combining the CDR definitions of both Kabat and Chothia, the CDRs consist of amino acid residues 26-35 (CDR-H1), 50-65 (CDR-H2), and 95-102 (CDR-H3) in human VH and amino acid residues 24-34 (CDR-L1), 50-56 (CDR-L2), and 89-97 (CDR-L3) in human VL. Under IMGT the CDR amino acid residues in the VH are numbered approximately 26-35 (CDR-H1), 51-57 (CDR-H2) and 93-102 (CDR-H3), and the CDR amino acid residues in the VL are numbered approximately 27-32 (CDR-L1), 50-52 (CDR-L2), and 89-97 (CDR-L3) (numbering according to “Kabat”). Under IMGT, the CDR regions of an antibody can be determined using the program IMGT/DomainGap Align.

[0069] Single Chain Fv or scFv: The term “single-chain Fv” or “scFv” as used herein refers to antibody fragments comprise the VH and VL domains of an antibody, wherein these domains are present in a single polypeptide chain. Preferably, the Fv polypeptide further comprises a polypeptide linker between the VH and VL domains which enables the scFv to form the desired structure for antigen-binding. For a review of scFv see Plückthun in The Pharmacology of Monoclonal Antibodies, vol. 113, Rosenburg and Moore eds., (1994) Springer-Verlag, New York, pp. 269-315.

[0070] Diabody: The term “diabody” as used herein refers to small antibody fragments with two antigen-binding sites, typically formed by pairing of scFv chains. Each scFv comprises a heavy chain variable domain (VH) connected to a light chain variable domain (VL) in the same polypeptide chain (VH-VL, where the VH is either N-terminal or C-terminal to the VL). Unlike a typical scFv in which the VH and VL are separated by a linker that allows the VH and VL on the same polypeptide chain to pair and form an antigen-binding domain, diabodies typically comprise a linker that is too short to allow pairing between the VH and VL domains on the same chain, forcing the VH and VL domains to pair with the complementary domains of another chain and create two antigen-binding sites. Diabodies are described more fully in, for example, EP 404,097; WO 93/11161; and Hollinger et al., 1993, Proc. Natl. Acad. Sci. USA 90:6444-6448.

[0071] Fv: The term “Fv” refers to the minimum antibody fragment derivable from an immunoglobulin that contains a complete target recognition and binding site. This region consists of a dimer of one heavy and one light chain variable domain in a tight, noncovalent association (VH-VL dimer). It is in this configuration that the three CDRs of each variable domain interact to define a target binding site on the surface of the VH-VL dimer. Often, the six CDRs confer target binding specificity to the antibody. However, in some instances even a single variable domain (or half of an Fv comprising only three CDRs specific for a target) can have the ability to recognize and bind target. The reference to a VH-VL dimer herein is not intended to convey any particular configuration. By way of example and not limitation, the VH and VL can come together in any configuration described herein to form a half antibody, or can each be present on a separate half antibody and come together to form an antigen binding domain when the separate half antibodies associate, for example to form a TBM of the disclosure. When present on a single polypeptide chain (e.g., a scFv), the VH and be N-terminal or C-terminal to the VL.

[0072] Multispecific binding molecules: The term “multispecific binding molecules” refers to molecules that specifically bind to at least two antigens and comprise two or more antigen-binding domains. The antigen-binding domains can each independently be an antibody fragment (e.g., scFv, Fab, nanobody), a ligand, or a non-antibody derived binder (e.g., fibronectin, Fynomer, DARPin).

[0073] Trispecific binding molecules: The term “trispecific binding molecules” or “TBMs” refers to molecules that specifically bind to three antigens and comprise three or more antigen-binding domains. The TBMs of the disclosure comprise at least one antigen-binding domain which is specific for a component of a TCR complex, at least one antigen-binding domain which is specific for CD2, and at least one antigen-binding domain which is specific for a TAA. The antigen-binding domains can each independently be an antibody fragment (e.g., scFv, Fab, nanobody), a ligand, or a non-antibody derived binder (e.g., fibronectin, Fynomer, DARPin). Representative TBMs are illustrated in FIG. 1. TBMs can comprise one, two, three, four or even more polypeptide chains. For example, the TBM illustrated in FIG. 1M comprises a single polypeptide chain comprising three scFvs connected by ABM linkers one a single polypeptide chain. The TBM illustrated in FIG. 1K comprises two polypeptide chains comprising three scFvs connected by, inter alia, an Fc domain. The TBM illustrated in FIG. 1J comprises three polypeptide chains forming an scFv, a ligand, and a Fab connected by, inter alia, an Fc domain. The TBM illustrated in FIG. 1C comprises four polypeptide chains forming three Fabs connected by, inter alia, an Fc domain. The TBM illustrated in FIG. 1T comprises 6 polypeptide chains forming four Fabs and two scFvs connected by, inter alia, an Fc domain.

[0074] VH: The term “VH” refers to the variable region of an immunoglobulin heavy chain of an antibody, including the heavy chain of an Fv, scFv, dsFv or Fab.

[0075] VL: The term “VL” refers to the variable region of an immunoglobulin light chain, including the light chain of an Fv, scFv, dsFv or Fab.

[0076] Operably linked: The term “operably linked” refers to a functional relationship between two or more peptide or polypeptide domains or nucleic acid (e.g., DNA) segments. In the context of a fusion protein or other polypeptide, the term “operably linked” means that two or more amino acid segments are linked so as to produce a functional polypeptide. For example, in the context of a TBM of the disclosure, separate ABMs (or chains of an ABM) can be through peptide linker sequences. In the context of a nucleic acid encoding a fusion protein, such as a a polypeptide chain of a TBM of the disclosure, “operably linked” means that the two nucleic acids are joined such that the amino acid sequences encoded by the two nucleic acids remain in-frame. In the context of transcriptional regulation, the term refers to the functional relationship of a transcriptional regulatory sequence to a transcribed sequence. For example, a promoter or enhancer sequence is operably linked to a coding sequence if it stimulates or modulates the transcription of the coding sequence in an appropriate host cell or other expression system.

[0077] Associated: The term “associated” in the context of a TBM refers to a functional relationship between two or more polypeptide chains. In particular, the term “associated” means that two or more polypeptides are associated with one another, e.g., non-covalently through molecular interactions or covalently through one or more disulfide bridges or chemical cross-linkages, so as to produce a functional TBM in which ABM1, ABM2 and ABM3 can bind their respective targets. Examples of associations that might be present in a TBM of the disclosure include (but are not limited to) associations between Fc regions in an Fc domain (homodimeric or, more preferably, heterodimeric as described in Section 6.3.1.5), associations between VH and VL regions in a Fab or Fv, and associations between CH1 and CL in a Fab.

[0078] ABM chain: Individual ABMs can exist as one (e.g., in the case of an scFv) polypeptide chain or form through the association of more than one polypeptide chains (e.g., in the case of a Fab). As used herein, the term “ABM chain” refers to all or a portion of an ABM that exists on a single polypeptide chain. The use of the term “ABM chain” is intended for convenience and descriptive purposes only and does not connote a particular configuration or method of production.

[0079] Host cell or recombinant host cell: The terms “host cell” or “recombinant host cell” refer to a cell that has been genetically-engineered, e.g., through introduction of a heterologous nucleic acid. It should be understood that such terms are intended to refer not only to the particular subject cell but to the progeny of such a cell. Because certain modifications may occur in succeeding generations due to either mutation or environmental influences, such progeny may not, in fact, be identical to the parent cell, but are still included within the scope of the term “host cell” as used herein. A host cell may carry the heterologous nucleic acid transiently, e.g., on an extrachromosomal heterologous expression vector, or stably, e.g., through integration of the heterologous nucleic acid into the host cell genome. For purposes of expressing a TBM of the disclosure, a host cell is preferably a cell line of mammalian origin or mammalian-like characteristics, such as monkey kidney cells (COS, e.g., COS-1, COS-7), HEK293, baby hamster kidney (BHK, e.g., BHK21), Chinese hamster ovary (CHO), NSO, PerC6, BSC-1, human hepatocellular carcinoma cells (e.g., Hep G2), SP2/0, HeLa, Madin-Darby bovine kidney (MDBK), myeloma and lymphoma cells, or derivatives and/or engineered variants thereof. The engineered variants include, e.g., glycan profile modified and/or site-specific integration site derivatives.

[0080] Sequence identity: The term percent “identity,” in the context of two or more nucleic acids or polypeptide sequences, refers to two or more sequences that are the same. Two sequences are “substantially identical” if two sequences have a specified percentage of amino acid residues or nucleotides that are the same (e.g., 60% identity, optionally 70%, 71%. 72%. 73%, 74%, 75%, 76%, 77%, 78%, 79%, 80%, 81%, 82%, 83%, 84%, 85%, 86%, 87%, 88%, 89%, 90%, 91%, 92%, 93%, 94%, 95%, 96%, 97%, 98%, 99% identity over a specified region, or, when not specified, over the entire sequence), when compared and aligned for maximum correspondence over a comparison window, or designated region as measured using one of the following sequence comparison algorithms or by manual alignment and visual inspection. Optionally, the identity exists over a region that is at least about 50 nucleotides (or, in the case of a peptide or polypeptide, at least about 10 amino acids) in length, or more preferably over a region that is 100 to 500 or 1000 or more nucleotides (or 20, 50, 200 or more amino acids) in length.

[0081] For sequence comparison, typically one sequence acts as a reference sequence, to which test sequences are compared. When using a sequence comparison algorithm, test and reference sequences are entered into a computer, subsequence coordinates are designated, if necessary, and sequence algorithm program parameters are designated. Default program parameters can be used, or alternative parameters can be designated. The sequence comparison algorithm then calculates the percent sequence identities for the test sequences relative to the reference sequence, based on the program parameters. Methods of alignment of sequences for comparison are well known in the art. Optimal alignment of sequences for comparison can be conducted, e.g., by the local homology algorithm of Smith and Waterman, 1970, Adv. Appl. Math. 2:482c, by the homology alignment algorithm of Needleman and Wunsch, 1970, J. Mol. Biol. 48:443, by the search for similarity method of Pearson and Lipman, 1988, Proc. Nat'l. Acad. Sci. USA 85:2444, by computerized implementations of these algorithms (GAP, BESTFIT, FASTA, and TFASTA in the Wisconsin Genetics Software Package, Genetics Computer Group, 575 Science Dr., Madison, Wis.), or by manual alignment and visual inspection (see, e.g., Brent et al., 2003, Current Protocols in Molecular Biology).

[0082] Two examples of algorithms that are suitable for determining percent sequence identity and sequence similarity are the BLAST and BLAST 2.0 algorithms, which are described in Altschul et al., 1977, Nuc. Acids Res. 25:3389-3402; and Altschul et al., 1990, J. Mol. Biol. 215:403-410, respectively. Software for performing BLAST analyses is publicly available through the National Center for Biotechnology Information.

[0083] The percent identity between two amino acid sequences can also be determined using the algorithm of Meyers and Miller, 1988, Comput. Appl. Biosci. 4:11-17, which has been incorporated into the ALIGN program (version 2.0), using a PAM120 weight residue table, a gap length penalty of 12 and a gap penalty of 4. In addition, the percent identity between two amino acid sequences can be determined using the Needleman and Wunsch, 1970, J. Mol. Biol. 48:444-453) algorithm which has been incorporated into the GAP program in the GCG software package (available at www.gcg.com), using either a Blossom 62 matrix or a PAM250 matrix, and a gap weight of 16, 14, 12, 10, 8, 6, or 4 and a length weight of 1, 2, 3, 4, 5, or 6.

[0084] Conservative Sequence Modifications: The term “conservative sequence modifications” refers to amino acid modifications that do not significantly affect or alter the binding characteristics of a TBM or a component thereof (e.g., an ABM or an Fc region). Such conservative modifications include amino acid substitutions, additions and deletions. Modifications can be introduced into a TBM of the disclosure by standard techniques known in the art, such as site-directed mutagenesis and PCR-mediated mutagenesis. Conservative amino acid substitutions are ones in which the amino acid residue is replaced with an amino acid residue having a similar side chain. Families of amino acid residues having similar side chains have been defined in the art. These families include amino acids with basic side chains (e.g., lysine, arginine, histidine), acidic side chains (e.g., aspartic acid, glutamic acid), uncharged polar side chains (e.g., glycine, asparagine, glutamine, serine, threonine, tyrosine, cysteine, tryptophan), nonpolar side chains (e.g., alanine, valine, leucine, isoleucine, proline, phenylalanine, methionine), beta-branched side chains (e.g., threonine, valine, isoleucine) and aromatic side chains (e.g., tyrosine, phenylalanine, tryptophan, histidine). Thus, one or more amino acid residues within a TBM of the disclosure can be replaced with other amino acid residues from the same side chain family and the altered TBM can be tested for, e.g., binding to target molecules and/or effective heterodimerization and/or effector function.

[0085] Mutation or modification: The terms “mutation” and “modification” in the context of a polypeptide as used herein can include substitution, addition or deletion of one or more amino acids.

[0086] Antibody Numbering Systems: In the present specification, the references to numbered amino acid residues in antibody domains are based on the EU numbering system unless otherwise specified (for example, in Tables 7B and 7C). This system was originally devised by Edelman et al., 1969, Proc. Nat'l Acad. Sci. USA 63:78-85 and is described in detail in Kabat et al., 1991, in Sequences of Proteins of Immunological Interest, US Department of Health and Human Services, NIH, USA.

[0087] dsFv: The term “dsFv” refers to disulfide-stabilized Fv fragments. In a dsFv, a VH and VL are connected by an interdomain disulfide bond. To generate such molecules, one amino acid each in the framework region of in VH and VL are mutated to a cysteine, which in turn form a stable interchain disulfide bond. Typically, position 44 in the VH and position 100 in the VL are mutated to cysteines. See Brinkmann, 2010, Antibody Engineering 181-189, D01:10.1007/978-3-642-01147-4_14. The term dsFv encompasses both what is known in the art a dsFv (a molecule in which the VH and VL are connected by an interchain disulfide bond but not a linker peptide) or scdsFv (a molecule in which the VH and VL are connected by a linker as well as an interchain disulfide bond).

[0088] Tandem of VH Domains: The term “a tandem of VH domains (or VHs)” as used herein refers to a string of VH domains, consisting of multiple numbers of identical VH domains of an antibody. Each of the VH domains, except the last one at the end of the tandem, has its C-terminus connected to the N-terminus of another VH domain with or without a linker. A tandem has at least 2 VH domains, and in particular embodiments of the TBMs of the disclosure has 3, 4, 5, 6, 7, 8, 9, or 10 VH domains. The tandem of VH can be produced by joining the encoding nucleic acids of each VH domain in a desired order using recombinant methods with or without a linker (e.g., as described in Section 6.3.3) that enables them to be made as a single polypeptide chain. The N-terminus of the first VH domain in the tandem is defined as the N-terminus of the tandem, while the C-terminus of the last VH domain in the tandem is defined as the C-terminus of the tandem.

[0089] Tandem of VL Domains: The term “a tandem of VL domains (or VLs)” as used herein refers to a string of VL domains, consisting of multiple numbers of identical VL domains of an antibody. Each of the VL domains, except the last one at the end of the tandem, has its C-terminus connected to the N-terminus of another VL with or without a linker. A tandem has at least 2 VL domains, and in particular embodiments of the TBMs of the disclosure has 3, 4, 5, 6, 7, 8, 9, or 10 VL domains. The tandem of VL can be produced by joining the encoding nucleic acids of each VL domain in a desired order using recombinant methods with or without a linker (e.g., as described in Section 6.3.3) that enables them to be made as a single polypeptide chain. The N-terminus of the first VL domain in the tandem is defined as the N-terminus of the tandem, while the C-terminus of the last VL domain in the tandem is defined as the C-terminus of the tandem.

[0090] Monovalent: The term “monovalent” as used herein in the context of an antigen-binding molecule refers to an antigen-binding molecule that has a single antigen-binding domain.

[0091] Bivalent: The term “bivalent” as used herein in the context of an antigen-binding molecule refers to an antigen-binding molecule that has two antigen-binding domains. The domains can be the same or different. Accordingly, a bivalent antigen-binding molecule can be monospecific or bispecific.

[0092] Trivalent: The term “trivalent” as used herein in the context of an antigen-binding molecule (e.g., a TBM) refers to an antigen-binding molecule that has three antigen-binding domains. The TBMs of the disclosure are trispecific and specifically bind to CD2, a component of a TCR complex and a TAA. Accordingly, the trivalent TBMs of the disclosure have at least three antigen-binding domains that each bind to a different antigen. Examples of trivalent TBMs of the disclosure are shown schematically in FIGS. 1B-1U.

[0093] Tetravalent: The term “tetravalent” as used herein in the context of an antigen-binding molecule (e.g., a TBM) refers to an antigen-binding molecule that has four antigen-binding domains. The TBMs of the disclosure are trispecific and specifically bind to CD2, a component of a TCR complex and a TAA. Accordingly, the tetravalent TBMs of the disclosure generally have two antigen-binding domains that bind to the same antigen (preferably the TAA) and two antigen-binding domains that each bind to a separate antigen (preferably CD2 and a component of a TCR complex). Examples of tetravalent TBMs of the disclosure are shown schematically in FIGS. 1P-1R.

[0094] Pentavalent: The term “pentavalent” as used herein in the context of an antigen-binding molecule (e.g., a TBM) refers to an antigen-binding molecule that has five antigen-binding domains. The TBMs of the disclosure are trispecific and specifically bind to CD2, a component of a TCR complex and a TAA. Accordingly, the pentavalent TBMs of the disclosure generally have either (a) two pairs of antigen-binding domains that each bind to the same antigen and a single antigen-binding domain that binds to the third antigen or (b) three antigen-binding domains that bind to the same antigen and two antigen-binding domains that each bind to a separate antigen. An example of a pentavalent TBM of the disclosure is shown schematically in FIG. 1S.

[0095] Hexavalent: The term “hexavalent” as used herein in the context of an antigen-binding molecule (e.g., a TBM) refers to an antigen-binding molecule that has six antigen-binding domains. The TBMs of the disclosure are trispecific and specifically bind to CD2, a component of a TCR complex and a TAA. The hexavalent TBMs of the disclosure generally have three pairs of antigen-binding domains that each bind to the same antigen, although different configurations (e.g., three antigen-binding domains that bind to the TAA, two antigen-binding domains that bind to a component of a TCR complex, and one antigen-binding domain that binds to CD2, or three antigen-binding domains that bind to the TAA, two antigen-binding domains that bind to CD2, and one antigen-binding domain that binds to a component of a TCR complex) are within the scope of the disclosure. Examples of hexavalent TBMs of the disclosure are shown schematically in FIGS. 1T-1U.

[0096] Specifically (or selectively) binds: The term “specifically (or selectively) binds” to an antigen or an epitope refers to a binding reaction that is determinative of the presence of a cognate antigen or an epitope in a heterogeneous population of proteins and other biologics. The binding reaction can be but need not be mediated by an antibody or antibody fragment, but can also be mediated by, for example, any type of ABM described in Section 6.2, such as a ligand, a DARPin, etc. An ABM of the disclosure typically also has a dissociation rate constant (KD) (koff/kon) of less than 5×10⁻²M, less than 10⁻²M, less than 5×10⁻³M, less than 10⁻³M, less than 5×10⁻⁴M, less than 10⁻⁴M, less than 5×10⁻⁵M, less than 10⁻⁵M, less than 5×10⁻⁶M, less than 10⁻⁶M, less than 5×10⁻⁷M, less than 10⁻⁷M, less than 5×10⁻⁸M, less than 10⁻⁸M, less than 5×10⁻⁹M, or less than 10⁻⁹M, and binds to the target antigen with an affinity that is at least two-fold greater than its affinity for binding to a non-specific antigen (e.g., HSA). The term “specifically binds” does not exclude cross-species reactivity. For example, an antigen-binding module (e.g., an antigen-binding fragment of an antibody) that “specifically binds” to an antigen from one species may also “specifically bind” to that antigen in one or more other species. Thus, such cross-species reactivity does not itself alter the classification of an antigen-binding module as a “specific” binder. In certain embodiments, an antigen-binding module of the disclosure (e.g., ABM1, ABM2 and/or ABM3) that specifically binds to a human antigen has cross-species reactivity with one or more non-human mammalian species, e.g., a primate species (including but not limited to one or more of Macaca fascicularis, Macaca mulatta, and Macaca nemestrina) or a rodent species, e.g., Mus musculus. In other embodiments, the antigen-binding module of the disclosure (e.g., ABM1, ABM2 and/or ABM3) does not have cross-species reactivity.

[0097] Monoclonal Antibody: The term “monoclonal antibody” as used herein refers to polypeptides, including antibodies, antibody fragments, molecules (including TBMs), etc. that are derived from the same genetic source.

[0098] Humanized: The term “humanized” forms of non-human (e.g., murine) antibodies are chimeric antibodies that contain minimal sequence derived from non-human immunoglobulin. For the most part, humanized antibodies are human immunoglobulins (recipient antibody) in which residues from a hypervariable region of the recipient are replaced by residues from a hypervariable region of a non-human species (donor antibody) such as mouse, rat, rabbit or non-human primate having the desired specificity, affinity, and capacity. In some instances, framework region (FR) residues of the human immunoglobulin are replaced by corresponding non-human residues. Furthermore, humanized antibodies may comprise residues that are not found in the recipient antibody or in the donor antibody. These modifications are made to further refine antibody performance. In general, the humanized antibody will comprise substantially all of at least one, and typically two, variable domains, in which all or substantially all of the hypervariable loops correspond to those of a non-human immunoglobulin and all or substantially all of the FRs are those of a human immunoglobulin lo sequence. The humanized antibody optionally will also comprise at least a portion of an immunoglobulin constant region (Fc), typically that of a human immunoglobulin. For further details, see Jones et al., 1986, Nature 321:522-525; Riechmann et al., 1988, Nature 332:323-329; and Presta, 1992, Curr. Op. Struct. Biol. 2:593-596. See also the following review articles and references cited therein: Vaswani and Hamilton, 1998, Ann. Allergy, Asthma & Immunol. 1:105-115; Harris, 1995, Biochem. Soc. Transactions 23:1035-1038; Hurle and Gross, 1994, Curr. Op. Biotech. 5:428-433.

[0099] Human Antibody: The term “human antibody” as used herein includes antibodies having variable regions in which both the framework and CDR regions are derived from sequences of human origin. Furthermore, if the antibody contains a constant region, the constant region also is derived from such human sequences, e.g., human germline sequences, or mutated versions of human germline sequences or antibody containing consensus framework sequences derived from human framework sequences analysis, for example, as described in Knappik et al., 2000, J Mol Biol 296, 57-86. The structures and locations of immunoglobulin variable domains, e.g., CDRs, may be defined using well known numbering schemes, e.g., the Kabat numbering scheme, the Chothia numbering scheme, or a combination of Kabat and Chothia (see, e.g., Lazikani et al., 1997, J. Mol. Bio. 273:927 948; Kabat et al., 1991, Sequences of Proteins of Immunological Interest, 5th edit., NIH Publication no. 91-3242 U.S. Department of Health and Human Services; Chothia et al., 1987, J. Mol. Biol. 196:901-917; Chothia et al., 1989, Nature 342:877-883).

[0100] Human antibodies may include amino acid residues not encoded by human sequences (e.g., mutations introduced by random or site-specific mutagenesis in vitro or by somatic mutation in vivo, or a conservative substitution to promote stability or manufacturing). However, the term “human antibody”, as used herein, is not intended to include antibodies in which CDR sequences derived from the germline of another mammalian species, such as a mouse, have been grafted onto human framework sequences.

[0101] Chimeric Antibody: The term “chimeric antibody” (or antigen-binding fragment thereof) is an antibody molecule (or antigen-binding fragment thereof) in which (a) the constant region, or a portion thereof, is altered, replaced or exchanged so that the antigen-binding site (variable region) is linked to a constant region of a different or altered class, effector function and/or species, or an entirely different molecule which confers new properties to the chimeric antibody, e.g., an enzyme, toxin, hormone, growth factor, drug, etc.; or (b) the variable region, or a portion thereof, is altered, replaced or exchanged with a variable region having a different or altered antigen specificity. For example, a mouse antibody can be modified by replacing its constant region with the constant region from a human immunoglobulin. Due to the replacement with a human constant region, the chimeric antibody can retain its specificity in recognizing the antigen while having reduced antigenicity in human as compared to the original mouse antibody.

[0102] Effector Function: The term “effector function” refers to an activity of an antibody molecule that is mediated by binding through a domain of the antibody other than the antigen-binding domain, usually mediated by binding of effector molecules. Effector function includes complement-mediated effector function, which is mediated by, for example, binding of the C1 component of the complement to the antibody. Activation of complement is important in the opsonization and lysis of cell pathogens. The activation of complement also stimulates the inflammatory response and may also be involved in autoimmune hypersensitivity. Effector function also includes Fc receptor (FcR)-mediated effector function, which may be triggered upon binding of the constant domain of an antibody to an Fc receptor (FcR). Binding of antibody to Fc receptors on cell surfaces triggers a number of important and diverse biological responses including engulfment and destruction of antibody-coated particles, clearance of immune complexes, lysis of antibody-coated target cells by killer cells (called antibody-dependent cell-mediated cytotoxicity, or ADCC), release of inflammatory mediators, placental transfer and control of immunoglobulin production. An effector function of an antibody may be altered by altering, e.g., enhancing or reducing, the affinity of the antibody for an effector molecule such as an Fc receptor or a complement component. Binding affinity will generally be varied by modifying the effector molecule binding site, and in this case it is appropriate to locate the site of interest and modify at least part of the site in a suitable way. It is also envisaged that an alteration in the binding site on the antibody for the effector molecule need not alter significantly the overall binding affinity but may alter the geometry of the interaction rendering the effector mechanism ineffective as in non-productive binding. It is further envisaged that an effector function may also be altered by modifying a site not directly involved in effector molecule binding, but otherwise involved in performance of the effector function.

[0103] Recognize: The term “recognize” as used herein refers to an ABM that finds and interacts (e.g., binds) with its epitope.

[0104] Epitope: An epitope, or antigenic determinant, is a portion of an antigen recognized by an antibody or other antigen-binding moiety as described herein. An epitope can be linear or conformational.

[0105] Nucleic Acid: The term “nucleic acid” is used herein interchangeably with the term “polynucleotide” and refers to deoxyribonucleotides or ribonucleotides and polymers thereof in either single- or double-stranded form. The term encompasses nucleic acids containing known nucleotide analogs or modified backbone residues or linkages, which are synthetic, naturally occurring, and non-naturally occurring, which have similar binding properties as the reference nucleic acid, and which are metabolized in a manner similar to the reference nucleotides. Examples of such analogs include, without limitation, phosphorothioates, phosphoramidates, methyl phosphonates, chiral-methyl phosphonates, 2-O-methyl ribonucleotides, peptide-nucleic acids (PNAs).

[0106] Unless otherwise indicated, a particular nucleic acid sequence also implicitly encompasses conservatively modified variants thereof (e.g., degenerate codon substitutions) and complementary sequences, as well as the sequence explicitly indicated. Specifically, as detailed below, degenerate codon substitutions may be achieved by generating sequences in which the third position of one or more selected (or all) codons is substituted with mixed-base and/or deoxyinosine residues (Batzer et al., (1991) Nucleic Acid Res. 19:5081; Ohtsuka et al., (1985) J. Biol. Chem. 260:2605-2608; and Rossolini et al., (1994) Mol. Cell. Probes 8:91-98).

[0107] Vector: The term “vector” is intended to refer to a polynucleotide molecule capable of transporting another polynucleotide to which it has been linked. One type of vector is a “plasmid”, which refers to a circular double stranded DNA loop into which additional DNA segments may be ligated. Another type of vector is a viral vector, wherein additional DNA segments may be ligated into the viral genome. Certain vectors are capable of autonomous replication in a host cell into which they are introduced (e.g., bacterial vectors having a bacterial origin of replication and episomal mammalian vectors). Other vectors (e.g., non-episomal mammalian vectors) can be integrated into the genome of a host cell upon introduction into the host cell, and thereby are replicated along with the host genome. Moreover, certain vectors are capable of directing the expression of genes to which they are operably linked. Such vectors are referred to herein as “recombinant expression vectors” (or simply, “expression vectors”). In general, expression vectors of utility in recombinant DNA techniques are often in the form of plasmids. In the present specification, “plasmid” and “vector” may be used interchangeably as the plasmid is the most commonly used form of vector. However, the disclosure is intended to include such other forms of expression vectors, such as viral vectors (e.g., replication defective retroviruses, adenoviruses and adeno-associated viruses), which serve equivalent functions.

[0108] Binding Sequences: In reference to Tables 7, 8, 9, 11, 12 or 13 (including subparts thereof), the term “binding sequences” means an ABM having a full set of CDRs, a VH-VL pair, or an scFv set forth in that table.

[0109] VH-VL or VH-VL Pair: In reference to a VH-VL pair, whether on the same polypeptide chain or on different polypeptide chains, the terms “VH-VL” and “VH-VL pair” are used for convience and are not intended to convey any particular orientation, unless the context dictates otherwise. Thus, a scFv comprising a “VH-VL” or “VH-VL pair” can have the VH and VL domains in any orientation, for example the VH N-terminal to the VL or the VL N-terminal to the VH.

[0110] Polypeptide and Protein: The terms “polypeptide” and “protein” are used interchangeably herein to refer to a polymer of amino acid residues. The phrases also apply to amino acid polymers in which one or more amino acid residue is an artificial chemical mimetic of a corresponding naturally occurring amino acid, as well as to naturally occurring amino acid polymers and non-naturally occurring amino acid polymer. Unless otherwise indicated, a particular polypeptide sequence also implicitly encompasses conservatively modified variants thereof.

[0111] Subject: The term “subject” includes human and non-human animals. Non-human animals include all vertebrates, e.g., mammals and non-mammals, such as non-human primates, sheep, dog, cow, chickens, amphibians, and reptiles. Except when noted, the terms “patient” or “subject” are used herein interchangeably.

[0112] Cancer: The term “cancer” refers to a disease characterized by the uncontrolled (and often rapid) growth of aberrant cells. Cancer cells can spread locally or through the bloodstream and lymphatic system to other parts of the body. Examples of various cancers are described herein and include but are not limited to, breast cancer, prostate cancer, ovarian cancer, cervical cancer, skin cancer, pancreatic cancer, colorectal cancer, renal cancer, liver cancer, brain cancer, adrenal gland cancer, autonomic ganglial cancer, binary tract cancer, bone cancer, endometrial cancer, eye cancer, fallopian tube cancer, genital tract cancers, large intestinal cancer, cancer of the meninges, oesophageal cancer, peritoneial cancer, pituitary cancer, penile cancer, placental cancer, pleura cancer, salivary gland cancer, small intestinal cancer, stomach cancer, testicular cancer, thymus cancer, thyroid cancer, upper aerodigestive cancers, urinary tract cancer, vaginal cancer, vulva cancer, lymphoma, leukemia, lung cancer and the like, e.g., any TAA-positive cancers of any of the foregoing types.

[0113] Tumor: The term “tumor” is used interchangeably with the term “cancer” herein, e.g., both terms encompass solid and liquid, e.g., diffuse or circulating, tumors. As used herein, the term “cancer” or “tumor” includes premalignant, as well as malignant cancers and tumors.

[0114] Tumor-Associated Antigen: The term “tumor-associated antigen” or “TAA” refers to a molecule (typically a protein, carbohydrate, lipid or some combination thereof) that is expressed on the surface of a cancer cell, either entirely or as a fragment (e.g., MHC/peptide), and which is useful for the preferential targeting of a pharmacological agent to the cancer cell. In some embodiments, a TAA is a marker expressed by both normal cells and cancer cells, e.g., a lineage marker, e.g., CD19 on B cells. In some embodiments, a TAA is a cell surface molecule that is overexpressed in a cancer cell in comparison to a normal cell, for instance, 1-fold over expression, 2-fold overexpression, 3-fold overexpression or more in comparison to a normal cell. In some embodiments, a TAA is a cell surface molecule that is inappropriately synthesized in the cancer cell, for instance, a molecule that contains deletions, additions or mutations in comparison to the molecule expressed on a normal cell. In some embodiments, a TAA will be expressed exclusively on the cell surface of a cancer cell, entirely or as a fragment (e.g., MHC/peptide), and not synthesized or expressed on the surface of a normal cell. Accordingly, the term “TAA” encompasses antigens that are specific to cancer cells, sometimes known in the art as tumor-specific antigens (“TSAs”).

[0115] Treat, Treatment, Treating: As used herein, the terms “treat”, “treatment” and “treating” refer to the reduction or amelioration of the progression, severity and/or duration of a proliferative disorder, or the amelioration of one or more symptoms (preferably, one or more discernible symptoms) of a proliferative disorder resulting from the administration of one or more TBMs of the disclosure. In specific embodiments, the terms “treat”, “treatment” and “treating” refer to the amelioration of at least one measurable physical parameter of a proliferative disorder, such as growth of a tumor, not necessarily discernible by the patient. In other embodiments the terms “treat”, “treatment” and “treating” refer to the inhibition of the progression of a proliferative disorder, either physically by, e.g., stabilization of a discernible symptom, physiologically by, e.g., stabilization of a physical parameter, or both. In other embodiments the terms “treat”, “treatment” and “treating” refer to the reduction or stabilization of tumor size or cancerous cell count.

### 6.2. Antigen Binding Modules

[0116] Typically, one or more ABMs of the TBMs of the disclosure comprise immunoglobulin-based antigen-binding domains, for example the sequences of antibody fragments or derivatives. These antibody fragments and derivatives typically include the CDRs of an antibody and can include larger fragments and derivatives thereof, e.g., Fabs, scFabs, Fvs, and scFvs.

[0117] 6.2.1. Immunoglobulin Based Modules

[0118] 6.2.1.1. Fabs

[0119] In certain aspects, an ABM of the disclosure is a Fab domain. Fab domains can be produced by proteolytic cleavage of immunoglobulin molecules, using enzymes such as papain, or through recombinant expression. Fab domains typically comprise a CH1 domain attached to a VH domain which pairs with a CL domain attached to a VL domain.

[0120] In a wild-type immunoglobulin, the VH domain is paired with the VL domain to constitute the Fv region, and the CH1 domain is paired with the CL domain to further stabilize the binding module. A disulfide bond between the two constant domains can further stabilize the Fab domain.

[0121] For the TBMs of the disclosure, it is advantageous to use Fab heterodimerization strategies to permit the correct association of Fab domains belonging to the same ABM and minimize aberrant pairing of Fab domains belonging to different ABMs. For example, the Fab heterodimerization strategies shown in Table 1 below can be used:

TABLE 1
Fab Heterodimerization Strategies

| Name | STRATEGY | VH | CH1 | VL | CL | REFERENCE |
|---|---|---|---|---|---|---|
| F1 | CrossMabCH1- | WT | CL domain | WT | CH1 domain | Schaefer et al., 2011, |
| | CL | | | | | Cancer Cell 2011; |
| | | | | | | 20:472-86; |
| | | | | | | PMID:22014573. |
| F2 | orthogonal Fab | 39K, | H172A, | 1R, 38D, | L135Y, | Lewis et al., 2014, Nat |
| | VHVRD1CH1CRD2- | 62E | F174G | (36F) | S176W | Biotechnol 32:191-8 |
| | VLVRD1CλCRD2 | | | | | |
| F3 | orthogonal Fab | 39Y | WT | 38R | WT | Lewis et al., 2014, Nat |
| | VHVRD2CH1wt- | | | | | Biotechnol 32:191-8 |
| | VLVRD2Cλwt | | | | | |
| F4 | TCR CαCβ | 39K | TCR Cα | 38D | TCR Cβ | Wu et al., 2015, MAbs |
| | | | | | | 7:364-76 |
| F5 | CR3 | WT | T192E | WT | N137K, | Golay at al., 2016, J |
| | | | | | S114A | Immunol 196:3199- |
| | | | | | | 211. |
| F6 | MUT4 | WT | L143Q, | WT | V133T, | Golay at al., 2016, J |
| | | | S188V | | S176V | Immunol 196:3199- |
| | | | | | | 211. |
| F7 | DuetMab | WT | F126C | WT | S121C | Mazor et al., 2015, |
| | | | | | | MAbs 7:377-89; Mazor |
| | | | | | | et al., 2015, MAbs |
| | | | | | | 7:461-669. |

[0122] Accordingly, in certain embodiments, correct association between the two polypeptides of a Fab is promoted by exchanging the VL and VH domains of the Fab for each other or exchanging the CH1 and CL domains for each other, e.g., as described in WO 2009/080251.

[0123] Correct Fab pairing can also be promoted by introducing one or more amino acid modifications in the CH1 domain and one or more amino acid modifications in the CL domain of the Fab and/or one or more amino acid modifications in the VH domain and one or more amino acid modifications in the VL domain. The amino acids that are modified are typically part of the VH:VL and CH1:CL interface such that the Fab components preferentially pair with each other rather than with components of other Fabs.

[0124] In one embodiment, the one or amino acid modifications are limited to the conserved framework residues of the variable (VH, VL) and constant (CH1, CL) domains as indicated by the Kabat numbering of residues. Almagro, 2008, Frontiers In Bioscience 13:1619-1633 provides a definition of the framework residues on the basis of Kabat, Chothia, and IMGT numbering schemes.

[0125] In one embodiment, the modifications introduced in the VH and CH1 and/or VL and CL domains are complementary to each other. Complementarity at the heavy and light chain interface can be achieved on the basis of steric and hydrophobic contacts, electrostatic/charge interactions or a combination of the variety of interactions. The complementarity between protein surfaces is broadly described in the literature in terms of lock and key fit, knob into hole, protrusion and cavity, donor and acceptor etc., all implying the nature of structural and chemical match between the two interacting surfaces.

[0126] In one embodiment, the one or more introduced modifications introduce a new hydrogen bond across the interface of the Fab components. In one embodiment, the one or more introduced modifications introduce a new salt bridge across the interface of the Fab components. Exemplary substitutions are described in WO 2014/150973 and WO 2014/082179, the contents of which are hereby incorporated by reference.

[0127] In some embodiments, the Fab domain comprises a 192E substitution in the CH1 domain and 114A and 137K substitutions in the CL domain, which introduces a salt-bridge between the CH1 and CL domains (see, Golay et al., 2016, J Immunol 196:3199-211).

[0128] In some embodiments, the Fab domain comprises a 143Q and 188V substitutions in the CH1 domain and 113T and 176V substitutions in the CL domain, which serves to swap hydrophobic and polar regions of contact between the CH1 and CL domain (see, Golay et al., 2016, J Immunol 196:3199-211).

[0129] In some embodiments, the Fab domain can comprise modifications in some or all of the VH, CH1, VL, CL domains to introduce orthogonal Fab interfaces which promote correct assembly of Fab domains (Lewis et al., 2014 Nature Biotechnology 32:191-198). In an embodiment, 39K, 62E modifications are introduced in the VH domain, H172A, F174G modifications are introduced in the CH1 domain, 1R, 38D, (36F) modifications are introduced in the VL domain, and L135Y, S176W modifications are introduced in the CL domain. In another embodiment, a 39Y modification is introduced in the VH domain and a 38R modification is introduced in the VL domain.

[0130] Fab domains can also be modified to replace the native CH1:CL disulfide bond with an engineered disulfide bond, thereby increasing the efficiency of Fab component pairing. For example, an engineered disulfide bond can be introduced by introducing a 126C in the CH1 domain and a 121C in the CL domain (see, Mazor et al., 2015, MAbs 7:377-89).

[0131] Fab domains can also be modified by replacing the CH1 domain and CL domain with alternative domains that promote correct assembly. For example, Wu et al., 2015, MAbs 7:364-76, describes substituting the CH1 domain with the constant domain of the α T cell receptor and substituting the CL domain with the β domain of the T cell receptor, and pairing these domain replacements with an additional charge-charge interaction between the VL and VH domains by introducing a 38D modification in the VL domain and a 39K modification in the VH domain.

[0132] ABMs of the disclosure can comprise a single chain Fab fragment, which is a polypeptide consisting of an antibody heavy chain variable domain (VH), an antibody constant domain 1 (CH1), an antibody light chain variable domain (VL), an antibody light chain constant domain (CL) and a linker. In some embodiments, the antibody domains and the linker have one of the following orders in N-terminal to C-terminal direction: a) VH-CH1-linker-VL-CL, b) VL-CL-linker-VH-CH1, c) VH-CL-linker-VL-CH1 or d) VL-CH1-linker-VH-CL. The linker can be a polypeptide of at least 30 amino acids, preferably between 32 and 50 amino acids. The single chain Fab domains are stabilized via the natural disulfide bond between the CL domain and the CH1 domain.

[0133] In an embodiment the antibody domains and the linker in the single chain Fab fragment have one of the following orders in N-terminal to C-terminal direction: a) VH-CH1-linker-VL-CL, or b) VL-CL-linker-VH-CH1, more preferably VL-CL-linker-VH-CH1.

[0134] In another embodiment the antibody domains and the linker in the single chain Fab fragment have one of the following orders in N-terminal to C-terminal direction: a) VH-CL-linker-VL-CH1 or b) VL-CH1-linker-VH-CL.

[0135] Optionally in the single chain Fab fragment, additionally to the natural disulfide bond between the CL-domain and the CH1 domain, also the antibody heavy chain variable domain (VH) and the antibody light chain variable domain (VL) are disulfide stabilized by introduction of a disulfide bond between the following positions: i) heavy chain variable domain position 44 to light chain variable domain position 100, ii) heavy chain variable domain position 105 to light chain variable domain position 43, or iii) heavy chain variable domain position 101 to light chain variable domain position 100 (numbering according to EU index of Kabat).

[0136] Such further disulfide stabilization of single chain Fab fragments is achieved by the introduction of a disulfide bond between the variable domains VH and VL of the single chain Fab fragments. Techniques to introduce unnatural disulfide bridges for stabilization for a single chain Fv are described e.g. in WO 94/029350, Rajagopal et al., 1997, Prot. Engin. 10:1453-59; Kobayashi et al., 1998, Nuclear Medicine & Biology, 25:387-393; and Schmidt, et al., 1999, Oncogene 18:1711-1721. In one embodiment the optional disulfide bond between the variable domains of the single chain Fab fragments is between heavy chain variable domain position 44 and light chain variable domain position 100. In one embodiment the optional disulfide bond between the variable domains of the single chain Fab fragments is between heavy chain variable domain position 105 and light chain variable domain position 43 (numbering according to EU index of Kabat).

[0137] 6.2.1.2. scFvs

[0138] Single chain Fv or “scFv” antibody fragments comprise the VH and VL domains of an antibody in a single polypeptide chain, are capable of being expressed as a single chain polypeptide, and retain the specificity of the intact antibody from which it is derived. Generally, the scFv polypeptide further comprises a polypeptide linker between the VH and VL domain that enables the scFv to form the desired structure for target binding. Examples of linkers suitable for connecting the VH and VL chains of an scFV are the ABM linkers identified in Section 6.3.3, for example any of the linkers designated L1 through L54.

[0139] Unless specified, as used herein an scFv may have the VL and VH variable regions in either order, e.g., with respect to the N-terminal and C-terminal ends of the polypeptide, the scFv may comprise VL-linker-VH or may comprise VH-linker-VL.

[0140] To create an scFv-encoding nucleic acid, the VH and VL-encoding DNA fragments are operably linked to another fragment encoding a linker, e.g., encoding any of the ABM linkers described in Section 6.3.3 (such as the amino acid sequence (Gly4 Ser)3) (SEQ ID NO: 1), such that the VH and VL sequences can be expressed as a contiguous single-chain protein, with the VL and VH regions joined by the flexible linker (see e.g., Bird et al., 1988, Science 242:423-426; Huston et al., 1988, Proc. Natl. Acad. Sci. USA 85:5879-5883; McCafferty et al., 1990, Nature 348:552-554).

[0141] 6.2.1.3. Other Immunoglobulin-Based Modules

[0142] TBMs of the disclosure can also comprise ABMs having an immunoglobulin format which is other than Fab or scFv, for example Fv, dsFv, (Fab′)2, a single domain antibody (SDAB), a VH or VL domain, or a camelid VHH domain (also called a nanobody).

[0143] An ABM can be a single domain antibody composed of a single VH or VL domain which exhibits sufficient affinity to the target. In a specific embodiment, the single domain antibody is a camelid VHH domain (see, e.g., Riechmann, 1999, Journal of Immunological Methods 231:25-38; WO 94/04678).

[0144] 6.2.2. Non-Immunoglobulin Based Modules

[0145] In certain embodiments, one or more of the ABMs of the disclosure are derived from non-antibody scaffold proteins (including, but not limited to, designed ankyrin repeat proteins (DARPins), Avimers (short for avidity multimers), Anticalin/Lipocalins, Centyrins, Kunitz domains, Adnexins, Affilins, Affitins (also known as Nonfitins), Knottins, Pronectins, Versabodies, Duocalins, and Fynomers), ligands, receptors, cytokines or chemokines.

[0146] Non-immunoglobulin scaffolds that can be used in the TBMs of the disclosure include those listed in Tables 3 and 4 of Mintz and Crea, 2013, Bioprocess International 11(2):40-48; in FIG. 1, Table 1 and Figure I of Vazquez-Lombardi et al., 2015, Drug Discovery Today 20(10):1271-83; in Table 1 and Box 2 of Skrlec et al., 2015, Trends in Biotechnology 33(7):408-18. The contents of Tables 3 and 4 of Mintz and Crea, 2013, Bioprocess International 11(2):40-48; in FIG. 1, Table 1 and Figure I of Vazquez-Lombardi et al., 2015, Drug Discovery Today 20(10):1271-83; in Table 1 and Box 2 of Skrlec et al., 2015, Trends in Biotechnology 33(7):408-18 (collectively, “Scaffold Disclosures”) are incorporated by reference herein. In a particular embodiment, the Scaffold Disclosures are incorporated by reference for what they disclose relating to Adnexins. In another embodiment, the Scaffold Disclosures are incorporated by reference for what they disclose relating to Avimers. In another embodiment, the Scaffold Disclosures are incorporated by reference for what they disclose relating to Affibodies. In yet another embodiment, the Scaffold Disclosures are incorporated by reference for what they disclose relating to Anticalins. In yet another embodiment, the Scaffold Disclosures are incorporated by reference for what they disclose relating to DARPins. In yet another embodiment, the Scaffold Disclosures are incorporated by reference for what they disclose relating to Kunitz domains. In yet another embodiment, the Scaffold Disclosures are incorporated by reference for what they disclose relating to Knottins. In yet another embodiment, the Scaffold Disclosures are incorporated by reference for what they disclose relating to Pronectins. In yet another embodiment, the Scaffold Disclosures are incorporated by reference for what they disclose relating to Nanofitins. In yet another embodiment, the Scaffold Disclosures are incorporated by reference for what they disclose relating to Affilins. In yet another embodiment, the Scaffold Disclosures are incorporated by reference for what they disclose relating to Adnectins. In yet another embodiment, the Scaffold Disclosures are incorporated by reference for what they disclose relating to ABDs. In yet another embodiment, the Scaffold Disclosures are incorporated by reference for what they disclose relating to Adhirons. In yet another embodiment, the Scaffold Disclosures are incorporated by reference for what they disclose relating to Affimers. In yet another embodiment, the Scaffold Disclosures are incorporated by reference for what they disclose relating to Alphabodies. In yet another embodiment, the Scaffold Disclosures are incorporated by reference for what they disclose relating to Armadillo Repeat Proteins. In yet another embodiment, the Scaffold Disclosures are incorporated by reference for what they disclose relating to Atrimers/Tetranectins. In yet another embodiment, the Scaffold Disclosures are incorporated by reference for what they disclose relating to Obodies/OB-folds. In yet another embodiment, the Scaffold Disclosures are incorporated by reference for what they disclose relating to Centyrins. In yet another embodiment, the Scaffold Disclosures are incorporated by reference for what they disclose relating to Repebodies. In yet another embodiment, the Scaffold Disclosures are incorporated by reference for what they disclose relating to Anticalins. In yet another embodiment, the Scaffold Disclosures are incorporated by reference for what they disclose relating to Atrimers. In yet another embodiment, the Scaffold Disclosures are incorporated by reference for what they disclose relating to bicyclic peptides. In yet another embodiment, the Scaffold Disclosures are incorporated by reference for what they disclose relating to cys-knots. In yet another embodiment, the Scaffold Disclosures are incorporated by reference for what they disclose relating to Fn3 scaffolds (including Adnectins, Centryrins, Pronectins, and Tn3).

[0147] In an embodiment, an ABM of the disclosure can be a designed ankyrin repeat protein (“DARPin”). DARPins are antibody mimetic proteins that typically exhibit highly specific and high-affinity target protein binding. They are typically genetically engineered and derived from natural ankyrin proteins and consist of at least three, usually four or five repeat motifs of these proteins. Their molecular mass is about 14 or 18 kDa (kilodaltons) for four- or five-repeat DARPins, respectively. Examples of DARPins can be found, for example in U.S. Pat. No. 7,417,130. Multispecific binding molecules comprising DARPin binding modules and immunoglobulin-based binding modules are disclosed in, for example, U.S. Publication No. 2015/0030596 A1.

[0148] In another embodiment, an ABM of the disclosure can be an Affibody. An Affibody is well known in the art and refers to affinity proteins based on a 58 amino acid residue protein domain, derived from one of the IgG binding domain of staphylococcal protein A.

[0149] In another embodiment, an ABM of the disclosure can be an Anticalin. Anticalins are well known in the art and refer to another antibody mimetic technology, wherein the binding specificity is derived from Lipocalins. Anticalins may also be formatted as dual targeting protein, called Duocalins.

[0150] In another embodiment, an ABM of the disclosure can be a Versabody. Versabodies are well known in the art and refer to another antibody mimetic technology. They are small proteins of 3-5 kDa with >15% cysteines, which form a high disulfide density scaffold, replacing the hydrophobic core the typical proteins have.

[0151] Other non-immunoglobulin ABMs include “A” domain oligomers (also known as Avimers) (see for example, U.S. Patent Application Publication Nos. 2005/0164301, 2005/0048512, and 2004/017576), Fn3 based protein scaffolds (see for example, U.S. Patent Application Publication 2003/0170753), VASP polypeptides, Avian pancreatic polypeptide (aPP), Tetranectin (based on CTLD3), Affililin (based on yB-crystallin/ubiquitin), Knottins, SH3 domains, PDZ domains, Tendamistat, Neocarzinostatin, Protein A domains, Lipocalins, Transferrin, and Kunitz domains. In one aspect, ABMs useful in the construction of the TBMs of the disclosure comprise fibronectin-based scaffolds as exemplified in WO 2011/130324.

[0152] Moreover, in certain aspects, an ABM comprises a ligand binding domain of a receptor or a receptor binding domain of a ligand. For example, if the TAA is the EGF receptor, ABM3 can comprise a portion of EGF that binds EGFR, and if the TAA is the PDGF receptor, ABM3 can comprise a portion of PDGF that binds PDGF, and so on and so forth. In a specific embodiment, ABM1 is a CD2 ligand, in particular a CD58 moiety as described in Section 6.6.2. The respective binding domains of numerous ligand/receptor pairs are well known in the art, and thus can be readily selected and adapted for use in the TBMs of the disclosure.

### 6.3. Connectors

[0153] It is contemplated that the TBMs of the disclosure can in some instances include pairs of ABMs or ABM chains (e.g., the VH-CH1 or VL-CL component of a Fab) connected directly to one another, e.g., as a fusion protein without a linker. More preferably, the TBMs of the disclosure comprise connector moieties linking individual ABMs or ABM chains. The use of connector moieties can improve target binding, for example by increasing flexibility of the ABMs within a TBM and thus reducing steric hindrance. The ABMs can be connected to one another through, for example, Fc domains (each Fc domain representing a pair of associated Fc regions) and/or ABM linkers. The use of Fc domains will typically require the use of hinge regions as connectors of the ABMs or ABM chains for optimal antigen binding. Thus, the term “connector” encompasses, but is not limited to, Fc regions, Fc domains, hinge regions, and

[0154] Examples of Fc domains (formed by the pairing of two Fc regions), hinge regions and ABM linkers are described in Sections 6.3.1, 6.3.2, and 6.3.3, respectively.

[0155] 6.3.1. Fc Domains

[0156] The TBMs of the disclosure can include an Fc domain derived from any suitable species. In one embodiment the Fc domain is derived from a human Fc domain.

[0157] The Fc domain may be derived from any suitable class of antibody, including IgA (including subclasses IgA1 and IgA2), IgD, IgE, IgG (including subclasses IgG1, IgG2, IgG3 and IgG4), and IgM. In one embodiment, the Fc domain is derived from IgG1, IgG2, IgG3 or IgG4. In one embodiment the Fc domain is derived from IgG1. In one embodiment the Fc domain is derived from IgG4.

[0158] The Fc domain comprises two polypeptide chains, each referred to as a heavy chain Fc region. The two heavy chain Fc regions dimerize to create the Fc domain. The two Fc regions within the Fc domain may be the same or different from one another. In a native antibody the Fc regions are typically identical, but for the purpose of producing multispecific binding molecules, e.g., the TBMs of the disclosure, the Fc regions might advantageously be different to allow for heterodimerization, as described in Section 6.3.1.5 below.

[0159] Typically each heavy chain Fc region comprises or consists of two or three heavy chain constant domains.

[0160] In native antibodies, the heavy chain Fc region of IgA, IgD and IgG is composed of two heavy chain constant domains (CH2 and CH3) and that of IgE and IgM is composed of three heavy chain constant domains (CH2, CH3 and CH4). These dimerize to create an Fc domain.

[0161] In the present disclosure, the heavy chain Fc region can comprise heavy chain constant domains from one or more different classes of antibody, for example one, two or three different classes.

[0162] In one embodiment the heavy chain Fc region comprises CH2 and CH3 domains derived from IgG1.

[0163] In one embodiment the heavy chain Fc region comprises CH2 and CH3 domains derived from IgG2.

[0164] In one embodiment the heavy chain Fc region comprises CH2 and CH3 domains derived from IgG3.

[0165] In one embodiment the heavy chain Fc region comprises CH2 and CH3 domains derived from IgG4.

[0166] In one embodiment the heavy chain Fc region comprises a CH4 domain from IgM. The IgM CH4 domain is typically located at the C-terminus of the CH3 domain.

[0167] In one embodiment the heavy chain Fc region comprises CH2 and CH3 domains derived from IgG and a CH4 domain derived from IgM.

[0168] It will be appreciated that the heavy chain constant domains for use in producing a heavy chain Fc region for the TBMs of the present disclosure may include variants of the naturally occurring constant domains described above. Such variants may comprise one or more amino acid variations compared to wild type constant domains. In one example the heavy chain Fc region of the present disclosure comprises at least one constant domain that varies in sequence from the wild type constant domain. It will be appreciated that the variant constant domains may be longer or shorter than the wild type constant domain. Preferably the variant constant domains are at least 60% identical or similar to a wild type constant domain. In another example the variant constant domains are at least 70% identical or similar. In another example the variant constant domains are at least 80% identical or similar. In another example the variant constant domains are at least 90% identical or similar. In another example the variant constant domains are at least 95% identical or similar. Exemplary Fc variants are described in Sections 6.3.1.1 through 6.3.1.5, infra.

[0169] IgM and IgA occur naturally in humans as covalent multimers of the common H2L2 antibody unit. IgM occurs as a pentamer when it has incorporated a J-chain, or as a hexamer when it lacks a J-chain. IgA occurs as monomer and dimer forms. The heavy chains of IgM and IgA possess an 18 amino acid extension to the C-terminal constant domain, known as a tailpiece. The tailpiece includes a cysteine residue that forms a disulfide bond between heavy chains in the polymer, and is believed to have an important role in polymerization. The tailpiece also contains a glycosylation site. In certain embodiments, the TBMs of the present disclosure do not comprise a tailpiece.

[0170] The Fc domains that are incorporated into the TBMs of the present disclosure may comprise one or more modifications that alter the functional properties of the proteins, for example, binding to Fc-receptors such as FcRn or leukocyte receptors (for example, as described in Section 6.3.1.1), binding to complement (for example as described in Section 6.3.1.2), modified disulfide bond architecture (for example as described in Section 6.3.1.3), or altered glycosylation patterns (for example as described in Section 6.3.1.4). The Fc domains can also be altered to include modifications that improve manufacturability of asymmetric TBMs, for example by allowing heterodimerization, which is the preferential pairing of non-identical Fc regions over identical Fc regions. Heterodimerization permits the production of TBMs in which different ABMs are connected to one another by an Fc domain containing Fc regions that differ in sequence. Examples of heterodimerization strategies are exemplified in Section 6.3.1.5 (and subsections thereof).

[0171] It will be appreciated that any of the modifications described in Sections 6.3.1.1 through 6.3.1.5 can be combined in any suitable manner to achieve the desired functional properties and/or combined with other modifications to alter the properties of the TBMs.

[0172] 6.3.1.1. Fc Domains with Altered FcR Binding

[0173] The Fc domains of the TBMs of the disclosure may show altered binding to one or more Fc-receptors (FcRs) in comparison with the corresponding native immunoglobulin. The binding to any particular Fc-receptor may be increased or decreased. In one embodiment, the Fc domain comprises one or more modifications which alter its Fc-receptor binding profile.

[0174] Human cells can express a number of membrane bound FcRs selected from FcaR, FccR, FcγR, FcRn and glycan receptors. Some cells are also capable of expressing soluble (ectodomain) FcR (Fridman et al., 1993, J Leukocyte Biology 54: 504-512 for review). FcγR can be further divided by affinity of IgG binding (high/low) and biological effect (activating/inhibiting). Human FcγRI is widely considered to be the sole ‘high affinity’ receptor whilst all of the others are considered as medium to low. FcγRIIb is the sole receptor with ‘inhibitory’ functionality by virtue of its intracellular ITIM motif whilst all of the others are considered as ‘activating’ by virtue of ITAM motifs or pairing with the common FcγR-γchain. FcγRIIIb is also unique in that although activatory it associates with the cell via a GPI anchor. In total, humans express six “standard” FcγRs: FcγRI, FcγRIIa, FcγRIIb, FcγRIIc, FcγRIIIa FcγRIIIb. In addition to these sequences there are a large number of sequence or allotypic variants spread across these families. Some of these have been found to have important functional consequence and so are sometimes considered to be receptor sub-types of their own. Examples include FcγRIIa^{H134R}, FcγRIIb^{I190T}, FcγRIIIa^{F158V} and FcγRIIIb^{NA1}, FcγRIIIb^{NA2} FcγRIII^{SH}. Each receptor sequence has been shown to have different affinities for the 4 sub-classes of IgG: IgG1, IgG2, IgG3 and IgG4 (Bruhns, 1993, Blood 113:3716-3725). Other species have somewhat different numbers and functionality of FcγR, with the mouse system being the best studied to date and comprising of 4 FcγR, FcγRI FcγRIIb FcγRIII FcγRIV (Bruhns, 2012, Blood 119:5640-5649). Human FcγRI on cells is normally considered to be ‘occupied’ by monomeric IgG in normal serum conditions due to its affinity for IgG1/IgG3/IgG4 (about 10⁻⁸ M) and the concentration of these IgG in serum (about 10 mg/ml). Hence cells bearing FcγRI on their surface are considered to be capable for “screening” or “sampling” of their antigenic environment vicariously through the bound polyspecific IgG. The other receptors having lower affinities for IgG sub-classes (in the range of about 10⁻⁵-10⁻⁷ M) are normally considered to be “unoccupied.” The low affinity receptors are hence inherently sensitive to the detection of and activation by antibody involved immune complexes. The increased Fc density in an antibody immune complex results in increased functional affinity of binding avidity to low affinity FcγR. This has been demonstrated in vitro using a number of methods (Shields et al., 2001, J Biol Chem 276(9):6591-6604; Lux et al., 2013, J Immunol 190:4315-4323). It has also been implicated as being one of the primary modes of action in the use of anti-RhD to treat ITP in humans (Crow, 2008, Transfusion Medicine Reviews 22:103-116).

[0175] Many cell types express multiple types of FcγR and so binding of IgG or antibody immune complex to cells bearing FcγR can have multiple and complex outcomes depending upon the biological context. Most simply, cells can either receive an activatory, inhibitory or mixed signal. This can result in events such as phagocytosis (e.g., macrophages and neutrophils), antigen processing (e.g., dendritic cells), reduced IgG production (e.g., B-cells) or degranulation (e.g., neutrophils, mast cells). There are data to support that the inhibitory signal from FcγRIIb can dominate that of activatory signals (Proulx, 2010, Clinical Immunology 135:422-429).

[0176] FcRn has a crucial role in maintaining the long half-life of IgG in the serum of adults and children. The receptor binds IgG in acidified vesicles (pH<6.5) protecting the IgG molecule from degradation, and then releasing it at the higher pH of 7.4 in blood.

[0177] FcRn is unlike leukocyte Fc receptors, and instead, has structural similarity to MHC class I molecules. It is a heterodimer composed of a β₂-microglobulin chain, non-covalently attached to a membrane-bound chain that includes three extracellular domains. One of these domains, including a carbohydrate chain, together with β₂-microglobulin interacts with a site between the CH2 and CH3 domains of Fc. The interaction includes salt bridges made to histidine residues on IgG that are positively charged at pH<6.5. At higher pH, the His residues lose their positive charges, the FcRn-IgG interaction is weakened and IgG dissociates.

[0178] In one embodiment, a TBM of the disclosure comprises an Fc domain that binds to human FcRn.

[0179] In one embodiment, the Fc domain has an (e.g., one or two) Fc regions comprising a histidine residue at position 310, and preferably also at position 435. These histidine residues are important for human FcRn binding. In one embodiment, the histidine residues at positions 310 and 435 are native residues, i.e., positions 310 and 435 are not modified. Alternatively, one or both of these histidine residues may be present as a result of a modification.

[0180] The TBMs of the disclosure may comprise one or more Fc regions that alter Fc binding to FcRn. The altered binding may be increased binding or decreased binding.

[0181] In one embodiment, the TBM comprises an Fc domain in which at least one (and optionally both) Fc regions comprises one or more modifications such that it binds to FcRn with greater affinity and avidity than the corresponding native immunoglobulin.

[0182] In one embodiment, the Fc region is modified by substituting the threonine residue at position 250 with a glutamine residue (T250Q).

[0183] In one embodiment, the Fc region is modified by substituting the methionine residue at position 252 with a tyrosine residue (M252Y)

[0184] In one embodiment, the Fc region is modified by substituting the serine residue at position 254 with a threonine residue (S254T).

[0185] In one embodiment, the Fc region is modified by substituting the threonine residue at position 256 with a glutamic acid residue (T256E).

[0186] In one embodiment, the Fc region is modified by substituting the threonine residue at position 307 with an alanine residue (T307A).

[0187] In one embodiment, the Fc region is modified by substituting the threonine residue at position 307 with a proline residue (T307P).

[0188] In one embodiment, the Fc region is modified by substituting the valine residue at position 308 with a cysteine residue (V308C).

[0189] In one embodiment, the Fc region is modified by substituting the valine residue at position 308 with a phenylalanine residue (V308F).

[0190] In one embodiment, the Fc region is modified by substituting the valine residue at position 308 with a proline residue (V308P).

[0191] In one embodiment, the Fc region is modified by substituting the glutamine residue at position 311 with an alanine residue (Q311A).

[0192] In one embodiment, the Fc region is modified by substituting the glutamine residue at position 311 with an arginine residue (Q311R).

[0193] In one embodiment, the Fc region is modified by substituting the methionine residue at position 428 with a leucine residue (M428L).

[0194] In one embodiment, the Fc region is modified by substituting the histidine residue at position 433 with a lysine residue (H433K).

[0195] In one embodiment, the Fc region is modified by substituting the asparagine residue at position 434 with a phenylalanine residue (N434F).

[0196] In one embodiment, the Fc region is modified by substituting the asparagine residue at position 434 with a tyrosine residue (N434Y).

[0197] In one embodiment, the Fc region is modified by substituting the methionine residue at position 252 with a tyrosine residue, the serine residue at position 254 with a threonine residue, and the threonine residue at position 256 with a glutamic acid residue (M252Y/S254T/T256E).

[0198] In one embodiment, the Fc region is modified by substituting the valine residue at position 308 with a proline residue and the asparagine residue at position 434 with a tyrosine residue (V308P/N434Y).

[0199] In one embodiment, the Fc region is modified by substituting the methionine residue at position 252 with a tyrosine residue, the serine residue at position 254 with a threonine residue, the threonine residue at position 256 with a glutamic acid residue, the histidine residue at position 433 with a lysine residue and the asparagine residue at position 434 with a phenylalanine residue (M252Y/S254T/T256E/H433K/N434F).

[0200] It will be appreciated that any of the modifications listed above may be combined to alter FcRn binding.

[0201] In one embodiment, the TBM comprises an Fc domain in which one or both Fc regions comprise one or more modifications such that the Fc domain binds to FcRn with lower affinity and avidity than the corresponding native immunoglobulin.

[0202] In one embodiment, the Fc region comprises any amino acid residue other than histidine at position 310 and/or position 435.

[0203] The TBM of the disclosure may comprise an Fc domain in which one or both Fc regions comprise one or more modifications which increase its binding to FcγRIIb. FcγRIIb is the only inhibitory receptor in humans and the only Fc receptor found on B cells.

[0204] In one embodiment, the Fc region is modified by substituting the proline residue at position 238 with an aspartic acid residue (P238D).

[0205] In one embodiment, the Fc region is modified by substituting the glutamic acid residue at position 258 with an alanine residue (E258A).

[0206] In one embodiment, the Fc region is modified by substituting the serine residue at position 267 with an alanine residue (S267A).

[0207] In one embodiment, the Fc region is modified by substituting the serine residue at position 267 with a glutamic acid residue (S267E).

[0208] In one embodiment, the Fc region is modified by substituting the leucine residue at position 328 with a phenylalanine residue (L328F).

[0209] In one embodiment, the Fc region is modified by substituting the glutamic acid residue at position 258 with an alanine residue and the serine residue at position 267 with an alanine residue (E258A/S267A).

[0210] In one embodiment, the Fc region is modified by substituting the serine residue at position 267 with a glutamic acid residue and the leucine residue at position 328 with a phenylalanine residue (S267E/L328F).

[0211] It will be appreciated that any of the modifications listed above may be combined to increase FcγRIIb binding.

[0212] In one embodiment of the disclosure, TBMs are provided comprising Fc domains which display decreased binding to FcγR.

[0213] In one embodiment TBM comprises an Fc domain in which one or both Fc regions comprise one or more modifications that decrease Fc binding to FcγR.

[0214] The Fc domain can be derived from IgG1.

[0215] In one embodiment, the Fc region is modified by substituting the leucine residue at position 234 with an alanine residue (L234A).

[0216] In one embodiment, the Fc region is modified by substituting the leucine residue at position 235 with an alanine residue (L235A).

[0217] In one embodiment, the Fc region is modified by substituting the glycine residue at position 236 with an arginine residue (G236R).

[0218] In one embodiment, the Fc region is modified by substituting the asparagine residue at position 297 with an alanine residue (N297A) or a glutamine residue (N297Q).

[0219] In one embodiment, the Fc region is modified by substituting the serine residue at position 298 with an alanine residue (S298A).

[0220] In one embodiment, the Fc region is modified by substituting the leucine residue at position 328 with an arginine residue (L328R).

[0221] In one embodiment, the Fc region is modified by substituting the leucine residue at position 234 with an alanine residue and the leucine residue at position 235 with an alanine residue (L234A/L235A).

[0222] In one embodiment, the Fc region is modified by substituting the phenylalanine residue at position 234 with an alanine residue and the leucine residue at position 235 with an alanine residue (F234A/L235A).

[0223] In one embodiment, the Fc region is modified by substituting the glycine residue at position 236 with an arginine residue and the leucine residue at position 328 with an arginine residue (G236R/L328R).

[0224] It will be appreciated that any of the modifications listed above may be combined to decrease FcγR binding.

[0225] In one embodiment a TBM of the present disclosure comprises an Fc domain in which one or both Fc regions comprise one or more modifications that decrease Fc binding to FcγRIIIa without affecting the Fc's binding to FcγRII.

[0226] In one embodiment, the Fc region is modified by substituting the serine residue at position 239 with an alanine residue (S239A).

[0227] In one embodiment, the Fc region is modified by substituting the glutamic acid residue at position 269 with an alanine residue (E269A).

[0228] In one embodiment, the Fc region is modified by substituting the glutamic acid residue at position 293 with an alanine residue (E293A).

[0229] In one embodiment, the Fc region is modified by substituting the tyrosine residue at position 296 with a phenylalanine residue (Y296F).

[0230] In one embodiment, the Fc region is modified by substituting the valine residue at position 303 with an alanine residue (V303A).

[0231] In one embodiment, the Fc region is modified by substituting the alanine residue at position 327 with a glycine residue (A327G).

[0232] In one embodiment, the Fc region is modified by substituting the lysine residue at position 338 with an alanine residue (K338A).

[0233] In one embodiment, the Fc region is modified by substituting the aspartic acid residue at position 376 with an alanine residue (D376A).

[0234] It will be appreciated that any of the modifications listed above may be combined to decrease FcγRIIIa binding.

[0235] 6.3.1.2. Fc Domains with Altered Complement Binding

[0236] The TBM of the disclosure may comprise an Fc domain in which one or both Fc regions comprises one or more modifications that alter Fc binding to complement. Altered complement binding may be increased binding or decreased binding.

[0237] In one embodiment the Fc region comprises one or more modifications which decrease its binding to C1q. Initiation of the classical complement pathway starts with binding of hexameric C1q protein to the CH2 domain of antigen bound IgG and IgM.

[0238] In one embodiment the TBM of the disclosure comprises an Fc domain in which one or both Fc regions comprises one or more modifications to decrease Fc binding to C1q.

[0239] In one embodiment, the Fc region is modified by substituting the leucine residue at position 234 with an alanine residue (L234A).

[0240] In one embodiment, the Fc region is modified by substituting the leucine residue at position 235 with an alanine residue (L235A).

[0241] In one embodiment, the Fc region is modified by substituting the leucine residue at position 235 with a glutamic acid residue (L235E).

[0242] In one embodiment, the Fc region is modified by substituting the glycine residue at position 237 with an alanine residue (G237A).

[0243] In one embodiment, the Fc region is modified by substituting the lysine residue at position 322 with an alanine residue (K322A).

[0244] In one embodiment, the Fc region is modified by substituting the proline residue at position 331 with an alanine residue (P331A).

[0245] In one embodiment, the Fc region is modified by substituting the proline residue at position 331 with a serine residue (P331S).

[0246] In one embodiment, a TBM of the disclosure comprises an Fc domain derived from IgG4. IgG4 has a naturally lower complement activation profile than IgG1, but also weaker binding of FcγR. Thus, in one embodiment, the TBM comprises an IgG4 Fc domain and also comprises one or more modifications that increase FcγR binding.

[0247] It will be appreciated that any of the modifications listed above may be combined to reduce C1q binding.

[0248] 6.3.1.3. Fc Domains with Altered Disulfide Architecture

[0249] The TBM of the disclosure can include an Fc domain comprising one or more modifications to create and/or remove a cysteine residue. Cysteine residues have an important role in the spontaneous assembly of Fc-based multispecific binding molecules, by forming disulfide bridges between individual pairs of polypeptide monomers. Thus, by altering the number and/or position of cysteine residues, it is possible to modify the structure of the TBM to produce a protein with improved therapeutic properties.

[0250] A TBM of the present disclosure can comprise an Fc domain in which one or both Fc regions, preferably both Fc regions, comprise a cysteine residue at position 309. In one embodiment, the cysteine residue at position 309 is created by a modification, e.g., for an Fc domain derived from IgG1, the leucine residue at position 309 is substituted with a cysteine residue (L309C), for an Fc domain derived from IgG2, the valine residue at position 309 is substituted with a cysteine residue (V309C).

[0251] In one embodiment, the Fc region is modified by substituting the valine residue at position 308 with a cysteine residue (V308C).

[0252] In one embodiment, two disulfide bonds in the hinge region are removed by mutating a core hinge sequence CPPC (SEQ ID NO: 2) to SPPS (SEQ ID NO: 3).

[0253] 6.3.1.4. Fc Domains with Altered Glycosylation

[0254] In certain aspects, TBMs with improved manufacturability are provided that comprise fewer glycosylation sites than a corresponding immunoglobulin. These proteins have less complex post translational glycosylation patterns and are thus simpler and less expensive to manufacture.

[0255] In one embodiment a glycosylation site in the CH2 domain is removed by substituting the asparagine residue at position 297 with an alanine residue (N297A) or a glutamine residue (N297Q). In addition to improved manufacturability, these aglycosyl mutants also reduce FcγR binding as described herein above.

[0256] 6.3.1.5. Fc Heterodimerization

[0257] Many multispecific molecule formats entail dimerization between two Fc regions that, unlike a native immunoglobulin, are operably linked to non-identical antigen-binding domains (or portions thereof, e.g., a VH or VH-CH1 of a Fab). Inadequate heterodimerization of two Fc regions to form an Fc domain has always been an obstacle for increasing the yield of desired multispecific molecules and represents challenges for purification. A variety of approaches available in the art can be used in for enhancing dimerization of Fc regions that might be present in the TBMs of the disclosure, for example as disclosed in EP 1870459A1; U.S. Pat. Nos. 5,582,996; 5,731,168; 5,910,573; 5,932,448; 6,833,441; 7,183,076; U.S. Patent Application Publication No. 2006204493A1; and PCT Publication No. W02009/089004A1.

[0258] The present disclosure provides TBMs comprising Fc heterodimers, i.e., Fc domains comprising heterologous, non-identical Fc regions. Heterodimerization strategies are used to enhance dimerization of Fc regions operably linked to different ABMs (or portions thereof, e.g., a VH or VH-CH1 of a Fab) and reduce dimerization of Fc regions operably linked to the same ABM or portion thereof. Typically, each Fc region in the Fc heterodimer comprises a CH3 domain of an antibody. The CH3 domains are derived from the constant region of an antibody of any isotype, class or subclass, and preferably of IgG (IgG1, IgG2, IgG3 and IgG4) class, as described in the preceding section.

[0259] Typically, the TBMs comprise other antibody fragments in addition to CH3 domains, such as, CH1 domains, CH2 domains, hinge domain, VH domain(s), VL domain(s), CDR(s), and/or antigen-binding fragments described herein. In some embodiments, the two hetero-polypeptides are two heavy chains forming a bispecific or multispecific molecules. Heterodimerization of the two different heavy chains at CH3 domains give rise to the desired antibody or antibody-like molecule, while homodimerization of identical heavy chains will reduce yield of the desired antibody or molecule. In an exemplary embodiment, the two or more hetero-polypeptide chains comprise two chains comprising CH3 domains and forming the molecules of any of the multispecific molecule formats described above of the present disclosure. In an embodiment, the two hetero-polypeptide chains comprising CH3 domains comprise modifications that favor heterodimeric association of the polypeptides, relative to unmodified chains. Various examples of modification strategies are provided below in Table 2 and Sections 6.3.1.5.1 to 6.3.1.5.3.

TABLE 2
Fc Heterodimerization Strategies

| NO. | STRATEGY | CH3 DOMAIN 1 | CH3 DOMAIN 2 | REFERENCES |
|---|---|---|---|---|
| Fc 1 | knobs-into-holes | T366Y | Y407T | Ridgway et al., 1996, |
| | (Y-T) | | | Protein Eng 9:617-21 |
| Fc 2 | knobs-into-holes | S354C, T366W | Y349C, T366S, | Atwell et al., 1997, J |
| | (CW-CSAV) | | L368A, Y407V | Mol Biol. 270(1):26- |
| | | | | 35; Merchant et al., |
| | | | | 1998, Nat Biotechnol |
| | | | | 16:677-681 |
| Fc 3 | HA-TF | S364H, F405A | Y349T, T394F | Moore et al., 2011, |
| | | | | MAbs 3(6):546-57 |
| Fc 4 | ZW1 (VYAV- | T350V, L351Y, | T350V, T366L, | Von Kreudenstein et |
| | VLLW) | F405A, Y407V | K392L, T394W | al., 2013, MAbs |
| | | | | 5:646-54 |
| Fc 5 | CH3 charge pairs | K392D, K409D | E356K, D399K | Gunasekaran et al., |
| | (DD-KK) | | | 2010, J Biol Chem |
| | | | | 285:19637-46 |
| Fc 6 | IgG1 hingE, CH3 | IgG1: D221E, | IgG1: D221R, | Strop et al., 2012, J |
| | charge pairs (EEE- | P228E, L368E | P228R, K409R | Mol Biol 420:204-19 |
| | RRR) | | | |
| Fc 7 | IgG2 hingE, CH3 | IgG2: C223E, | IgG2: C223R, | Strop et al., 2012, J |
| | charge pairs (EEE- | P228E, L368E | E225R, P228R, | Mol Biol 420:204-19 |
| | RRRR) | | K409R | |
| Fc 8 | EW-RVT | K360E, K409W, | Q347R, D399V, | Choi et al., 2013, Mol |
| | | | F405T | Cancer Ther |
| | | | | 12:2748-59 |
| Fc 9 | EW-RVTS-S | K360E, K409W, | Q347R, D399V, | Choi et al., 2015, Mol |
| | | Y349C | F405T, S354C | Immunol 65:377-83 |
| Fc 10 | Biclonic | 366K (+351K) | 351D or E or D at | Geuijen et al., 2014, |
| | | | 349, 368, 349, or | Journal of Clinical |
| | | | 349 + 355 | Oncology |
| | | | | 32:suppl:560 |
| Fc 11 | DuoBody (L-R) | F405L | K409R | Labrijn et al., 2013, |
| | | | | Proc Natl Acad Sci |
| | | | | U.S.A 110:5145-50 |
| Fc 12 | SEEDbody | IgG/A chimera | IgG/A chimera | Davis et al., 2010, |
| | | | | Protein Eng Des Sel |
| | | | | 23:195-202 |
| Fc 13 | BEAT | residues from | residues from | Moretti et al., 2013, |
| | | TCRα interface | TCRβ interface | BMC Proceedings |
| | | | | 7(Suppl 6):O9 |
| Fc 14 | 7.8.60 (DMA- | K360D, D399M, | E345R, Q347R, | Leaver-Fey et al., |
| | RRW) | Y407A | T366V, K409V | Structure 24:641-51 |
| Fc 15 | 20.8.34 (SYMV- | Y349S, K370Y, | E356G, E357D, | Leaver-Fey et al., |
| | GDQA) | T366M, K409V | S364Q, Y407A | Structure 24:641-51 |
| Fc 16 | Skew variant | None | none | FIG. 34 of U.S. |
| | 12757 | | | 2016/0355600 |
| Fc 17 | Skew variant | L368D, K370S | S364K | FIG. 34 of U.S. |
| | 12758 | | | 2016/0355600 |
| Fc 18 | Skew variant | L368D, K370S | S364K, E357L | FIG. 34 of U.S. |
| | 12759 | | | 2016/0355600 |
| Fc 19 | Skew variant | L368D, K370S | S364K, E357Q | FIG. 34 of U.S. |
| | 12760 | | | 2016/0355600 |
| Fc 20 | Skew variant | T411E, K360E, | D401K | FIG. 34 of U.S. |
| | 12761 | Q362E | | 2016/0355600 |
| Fc 21 | Skew variant | L368E, K370S | S364K | FIG. 34 of U.S. |
| | 12496 | | | 2016/0355600 |
| Fc 22 | Skew variant | K370S | S364K | FIG. 34 of U.S. |
| | 12511 | | | 2016/0355600 |
| Fc 23 | Skew variant | L368E, K370S | S364K, E357Q | FIG. 34 of U.S. |
| | 12840 | | | 2016/0355600 |
| Fc 24 | Skew variant | K370S | S364K, E357Q | FIG. 34 of U.S. |
| | 12841 | | | 2016/0355600 |
| Fc 25 | Skew variant | L368E, K370S | S364K | FIG. 34 of U.S. |
| | 12894 | | | 2016/0355600 |
| Fc 26 | Skew variant | K370S | S364K | FIG. 34 of U.S. |
| | 12895 | | | 2016/0355600 |
| Fc 27 | Skew variant | L368E, K370S | S364K, E357Q | FIG. 34 of U.S. |
| | 12896 | | | 2016/0355600 |
| Fc 28 | Skew variant | K370S | S364K, E357Q | FIG. 34 of U.S. |
| | 12901 | | | 2016/0355600 |
| Fc 29 | pl_ISO(−) | I199T, N203D, | | FIG. 31 of U.S. |
| | | K274Q, R355Q, | | 2016/0355600 |
| | | N384S, K392N, | | |
| | | V397M, Q419E, | | |
| | | DEL447 | | |
| Fc 30 | pl _(−)_Isosteric_A | N208D, Q295E, | | FIG. 31 of U.S. |
| | | N384D, Q418E, | | 2016/0355600 |
| | | N421D | | |
| Fc 31 | pl_(−)_isosteric_B | N208D, Q295E, | | FIG. 31 of U.S. |
| | | Q418E, N421D | | 2016/0355600 |
| Fc 32 | pl_ISO(+RR) | Q196K, I199T, | | FIG. 31 of U.S. |
| | | P217R, P228R, | | 2016/0355600 |
| | | N276K | | |
| Fc 33 | pl_ISO(+) | Q196K, I199T, | | FIG. 31 of U.S. |
| | | N276K | | 2016/0355600 |
| Fc 34 | pl_(+)_isosteric_A | E269Q, E272Q, | | FIG. 31 of U.S. |
| | | E283Q, E357Q, | | 2016/0355600 |
| Fc 35 | pl_(+)_isosteric_B | E269Q, E272Q, | | FIG. 31 of U.S. |
| | | E283Q | | 2016/0355600 |
| Fc 36 | pl_(+) | E269Q, E272Q | | FIG. 31 of U.S. |
| | isosteric_E269Q, | | | 2016/0355600 |
| | E272Q | | | |
| Fc 37 | pl_(+)_isosteric_E | E269Q, E283Q | | FIG. 31 of U.S. |
| | 269Q, E283Q | | | 2016/0355600 |
| Fc 38 | pl_(+) | E272Q, E283Q | | FIG. 31 of U.S. |
| | isosteric_E2720, | | | 2016/0355600 |
| | E283Q | | | |
| Fc 39 | pl_(+)_isosteric_E | E269Q | | FIG. 31 of U.S. |
| | 269Q | | | 2016/0355600 |
| Fc 40 | Heterodimerization | F405A | T394F | FIG. 30A of U.S. |
| | | | | 2016/0355600 |
| Fc 41 | Heterodimerization | S364D | Y349K | FIG. 30A of U.S. |
| | | | | 2016/0355600 |
| Fc 42 | Heterodimerization | S364E | L368K | FIG. 30A of U.S. |
| | | | | 2016/0355600 |
| Fc 43 | Heterodimerization | S364E | Y349K | FIG. 30A of U.S. |
| | | | | 2016/0355600 |
| Fc 44 | Heterodimerization | S364F | K370G | FIG. 30A of U.S. |
| | | | | 2016/0355600 |
| Fc 45 | Heterodimerization | S364H | Y349K | FIG. 30A of U.S. |
| | | | | 2016/0355600 |
| Fc 46 | Heterodimerization | S364H | Y349T | FIG. 30A of U.S. |
| | | | | 2016/0355600 |
| Fc 47 | Heterodimerization | S364Y | K370G | FIG. 30A of U.S. |
| | | | | 2016/0355600 |
| Fc 48 | Heterodimerization | T411K | K370E | FIG. 30A of U.S. |
| | | | | 2016/0355600 |
| Fc 49 | Heterodimerization | V397S, F405A | T394F | FIG. 30A of U.S. |
| | | | | 2016/0355600 |
| Fc 50 | Heterodimerization | K370R, T411K | K370E, T411E | FIG. 30A of U.S. |
| | | | | 2016/0355600 |
| Fc 51 | Heterodimerization | L351E, S364D | Y349K, L351K | FIG. 30A of U.S. |
| | | | | 2016/0355600 |
| Fc 52 | Heterodimerization | L351E, S364E | Y349K, L351K | FIG. 30A of U.S. |
| | | | | 2016/0355600 |
| Fc 53 | Heterodimerization | L351E, T366D | L351K, T366K | FIG. 30A of U.S. |
| | | | | 2016/0355600 |
| Fc 54 | Heterodimerization | P395T, V397S, | T394F | FIG. 30A of U.S. |
| | | F405A | | 2016/0355600 |
| Fc 55 | Heterodimerization | S364D, K370G | S364Y, K370R | FIG. 30A of U.S. |
| | | | | 2016/0355600 |
| Fc 56 | Heterodimerization | S364D, T394F | Y349K, F405A | FIG. 30A of U.S. |
| | | | | 2016/0355600 |
| Fc 57 | Heterodimerization | S364E, F405A | Y349K, T394F | FIG. 30A of U.S. |
| | | | | 2016/0355600 |
| Fc 58 | Heterodimerization | S364E, F405S | Y349K, T394Y | FIG. 30A of U.S. |
| | | | | 2016/0355600 |
| Fc 59 | Heterodimerization | S364E, T411E | Y349K, D401K | FIG. 30A of U.S. |
| | | | | 2016/0355600 |
| Fc 60 | Heterodimerization | S364H, D401K | Y349T, T411E | FIG. 30A of U.S. |
| | | | | 2016/0355600 |
| Fc 61 | Heterodimerization | S364H, F405A | Y349T, T394F | FIG. 30A of U.S. |
| | | | | 2016/0355600 |
| Fc 62 | Heterodimerization | S364H, T394F | Y349T, F405A | FIG. 30A of U.S. |
| | | | | 2016/0355600 |
| Fc 63 | Heterodimerization | Y349C, S364E | Y349K, S354C | FIG. 30A of U.S. |
| | | | | 2016/0355600 |
| Fc 64 | Heterodimerization | L351E, S364D, | Y349K, L351K, | FIG. 30A of U.S. |
| | | F405A | T394F | 2016/0355600 |
| Fc 65 | Heterodimerization | L351K, S364H, | Y349T, L351E, | FIG. 30A of U.S. |
| | | D401K | T411E | 2016/0355600 |
| Fc 66 | Heterodimerization | S364E, T411E, | Y349K, T394F, | FIG. 30A of U.S. |
| | | F405A | D401K | 2016/0355600 |
| Fc 67 | Heterodimerization | S364H, D401K, | Y349T, T394F, | FIG. 30A of U.S. |
| | | F405A | T411E | 2016/0355600 |
| Fc 68 | Heterodimerization | S364H, F405A, | Y349T, T394F, | FIG. 30A of U.S. |
| | | T411E | D401K | 2016/0355600 |
| Fc 69 | Heterodimerization | T411E, K360E, | D401K | FIG. 30C of U.S. |
| | | N390D | | 2016/0355600 |
| Fc 70 | Heterodimerization | T411E, Q362E, | D401K | FIG. 30C of U.S. |
| | | N390D | | 2016/0355600 |
| Fc 71 | Heterodimerization | T411E, Q347R | D401K, K360D | FIG. 30C of U.S. |
| | | | | 2016/0355600 |
| Fc 72 | Heterodimerization | T411E, Q347R | D401K, K360E | FIG. 30C of U.S. |
| | | | | 2016/0355600 |
| Fc 73 | Heterodimerization | T411E, K360 | D401K, Q347K | FIG. 30C of U.S. |
| | | | | 2016/0355600 |
| Fc 74 | Heterodimerization | T411E, K360D | D401K, Q347R | FIG. 30C of U.S. |
| | | | | 2016/0355600 |
| Fc 75 | Heterodimerization | T411E, K360E | D401K, Q347K | FIG. 30C of U.S. |
| | | | | 2016/0355600 |
| Fc 76 | Heterodimerization | T411E, K360E | D401K, Q347R | FIG. 30C of U.S. |
| | | | | 2016/0355600 |
| Fc 77 | Heterodimerization | T411E, S364K | D401K, K370S | FIG. 30C of U.S. |
| | | | | 2016/0355600 |
| Fc 78 | Heterodimerization | T411E, K370S | D401K, S364K | FIG. 30C of U.S. |
| | | | | 2016/0355600 |
| Fc 79 | Heterodimerization | Q347E | E357Q | FIG. 30C of U.S. |
| | | | | 2016/0355600 |
| Fc 80 | Heterodimerization | Q347E | E357Q, Q362K | FIG. 30C of U.S. |
| | | | | 2016/0355600 |
| Fc 81 | Heterodimerization | K360D, Q362E | Q347R | FIG. 30C of U.S. |
| | | | | 2016/0355600 |
| Fc 82 | Heterodimerization | K360D, Q362E | D401K | FIG. 30C of U.S. |
| | | | | 2016/0355600 |
| Fc 83 | Heterodimerization | K360D, Q362E | Q347R, D401K | FIG. 30C of U.S. |
| | | | | 2016/0355600 |
| Fc 84 | Heterodimerization | K360E, Q362E | Q347R | FIG. 30C of U.S. |
| | | | | 2016/0355600 |
| Fc 85 | Heterodimerization | K360E, Q362E | D401K | FIG. 30C of U.S. |
| | | | | 2016/0355600 |
| Fc 86 | Heterodimerization | K360E, Q362E | Q347R, D401K | FIG. 30C of U.S. |
| | | | | 2016/0355600 |
| Fc 87 | Heterodimerization | Q362E, N39QD | D401K | FIG. 30C of U.S. |
| | | | | 2016/0355600 |
| Fc 88 | Heterodimerization | Q347E, K360D | D401N | FIG. 30C of U.S. |
| | | | | 2016/0355600 |
| Fc 89 | Heterodimerization | K360D | Q347R, N390K | FIG. 30C of U.S. |
| | | | | 2016/0355600 |
| Fc 90 | Heterodimerization | K360D | N390K, D401N | FIG. 30C of U.S. |
| | | | | 2016/0355600 |
| Fc 91 | Heterodimerization | K360E | Y349H | FIG. 30C of U.S. |
| | | | | 2016/0355600 |
| Fc 92 | Heterodimerization | K370S, Q347E | S364K | FIG. 30C of U.S. |
| | | | | 2016/0355600 |
| Fc 93 | Heterodimerization | K370S, E357L | S364K | FIG. 30C of U.S. |
| | | | | 2016/0355600 |
| Fc 94 | Heterodimerization | K370S, E357Q | S364K | FIG. 30C of U.S. |
| | | | | 2016/0355600 |
| Fc 95 | Heterodimerization | K370S, Q347E, | S364K | FIG. 30C of U.S. |
| | | E357L | | 2016/0355600 |
| Fc 96 | Heterodimerization | K370S, Q347E, | S364K | FIG. 30C of U.S. |
| | | E357Q | | 2016/0355600 |
| Fc 97 | Heterodimerization | L368D, K370S, | S364K | FIG. 30D of U.S. |
| | | Q347E | | 2016/0355600 |
| Fc 98 | Heterodimerization | L368D, K370S, | S364K | FIG. 30D of U.S. |
| | | E357L | | 2016/0355600 |
| Fc 99 | Heterodimerization | L368D, K370S, | S364K | FIG. 30D of U.S. |
| | | E357Q | | 2016/0355600 |
| Fc 100 | Heterodimerization | L368D, K370S, | S364K | FIG. 30D of U.S. |
| | | Q347E, E357L | | 2016/0355600 |
| Fc 101 | Heterodimerization | L368D, K370S, | S364K | FIG. 30D of U.S. |
| | | Q347E, E357Q | | 2016/0355600 |
| Fc 102 | Heterodimerization | L368E, K370S, | S364K | FIG. 30D of U.S. |
| | | Q347E | | 2016/0355600 |
| Fc 103 | Heterodimerization | L368E, K370S, | S364K | FIG. 30D of U.S. |
| | | E357L | | 2016/0355600 |
| Fc 104 | Heterodimerization | L368E, K370S, | S364K | FIG. 30D of U.S. |
| | | E357Q | | 2016/0355600 |
| Fc 105 | Heterodimerization | L368E, K370S, | S364K | FIG. 30D of U.S. |
| | | Q347E, E357L | | 2016/0355600 |
| Fc 106 | Heterodimerization | L368E, K370S, | S364K | FIG. 30D of U.S. |
| | | Q347E, E357Q | | 2016/0355600 |
| Fc 107 | Heterodimerization | L368D, K370T, | S364K | FIG. 30D of U.S. |
| | | Q347E | | 2016/0355600 |
| Fc 108 | Heterodimerization | L368D, K370T, | S364K | FIG. 30D of U.S. |
| | | E357L | | 2016/0355600 |
| Fc 109 | Heterodimerization | L368D, K370T, | S364K | FIG. 30D of U.S. |
| | | E357Q | | 2016/0355600 |
| Fc 110 | Heterodimerization | L368D, K370T, | S364K | FIG. 30D of U.S. |
| | | Q347E, E357L | | 2016/0355600 |
| Fc 111 | Heterodimerization | L368D, K370T, | S364K | FIG. 30D of U.S. |
| | | Q347E, E357Q | | 2016/0355600 |
| Fc 112 | Heterodimerization | L368E, K370T, | S364K | FIG. 30D of U.S. |
| | | Q347E | | 2016/0355600 |
| Fc 113 | Heterodimerization | L368E, K370T, | S364K | FIG. 30D of U.S. |
| | | E357L | | 2016/0355600 |
| Fc 114 | Heterodimerization | L368E, K370T, | S364K | FIG. 30D of U.S. |
| | | E357Q | | 2016/0355600 |
| Fc 115 | Heterodimerization | L368E, K370T, | S364K | FIG. 30D of U.S. |
| | | Q347E, E357L | | 2016/0355600 |
| Fc 116 | Heterodimerization | L368E, K370T, | S364K | FIG. 30D of U.S. |
| | | Q347E, E357Q | | 2016/0355600 |
| Fc 117 | Heterodimerization | T411E, Q362E | D401K, T411K | FIG. 30D of U.S. |
| | | | | 2016/0355600 |
| Fc 118 | Heterodimerization | T411E, N390D | D401K, T411K | FIG. 30D of U.S. |
| | | | | 2016/0355600 |
| Fc 119 | Heterodimerization | T411E, Q362E | D401R, T411R | FIG. 30D of U.S. |
| | | | | 2016/0355600 |
| Fc 120 | Heterodimerization | T411E, N390D | D401R, T411R | FIG. 30D of U.S. |
| | | | | 2016/0355600 |
| Fc 121 | Heterodimerization | Y407T | T366Y | FIG. 30D of U.S. |
| | | | | 2016/0355600 |
| Fc 122 | Heterodimerization | F405A | T394W | FIG. 30D of U.S. |
| | | | | 2016/0355600 |
| Fc 123 | Heterodimerization | T366Y, F405A | T394W, Y407T | FIG. 30D of U.S. |
| | | | | 2016/0355600 |
| Fc 124 | Heterodimerization | T3665, L368A, | T366W | FIG. 30D of U.S. |
| | | Y407V | | 2016/0355600 |
| Fc 125 | Heterodimerization | T366S, L368A, | T366W, S354C | FIG. 30D of U.S. |
| | | Y407V, Y349C | | 2016/0355600 |
| Fc 126 | Heterodimerization | K392D, K4Q9D | E356K, D399K | FIG. 30E of U.S. |
| | | | | 2016/0355600 |
| Fc 127 | Heterodimerization | K370D, K392D, | E356K, E357K, | FIG. 30E of U.S. |
| | | K409D | D399K | 2016/0355600 |
| Fc 128 | Heterodimerization | I199T, N203D, | Q196K, L99T, | FIG. 30E of U.S. |
| | | K247Q, R355Q, | P217R, P228R, | 2016/0355600 |
| | | N384S, K392N, | N276K | |
| | | V397M, Q419E, | | |
| | | K447 | | |
| Fc 129 | Heterodimerization | I199T, N203D, | Q196K, L99T, | FIG. 30E of U.S. |
| | | K247Q, R355Q, | N276K | 2016/0355600 |
| | | N384S, K392N, | | |
| | | V397M, Q419E, | | |
| | | K447 | | |
| Fc 130 | Heterodimerization | N384S, K392N, | N276K | FIG. 30E of U.S. |
| | | V397M, Q419E | | 2016/0355600 |
| Fc 131 | Heterodimerization | D221E, P228E, | D221R, P228R, | FIG. 30E of U.S. |
| | | L368E | K409R | 2016/0355600 |
| Fc 132 | Heterodimerization | C220E, P228E, | C220R, E224R, | FIG. 30E of U.S. |
| | | L368E | P228R, K409R | 2016/0355600 |
| Fc 133 | Heterodimerization | F405L | K409R | FIG. 30E of U.S. |
| | | | | 2016/0355600 |
| Fc 134 | Heterodimerization | T366I, K392M, | F405A, Y407V | FIG. 30E of U.S. |
| | | T394W | | 2016/0355600 |
| Fc 135 | Heterodimerization | T366V, K409F | L351Y, Y407A | FIG. 30E of U.S. |
| | | | | 2016/0355600 |
| Fc 136 | Heterodimerization | T366A, K392E, | D399R, S400R, | FIG. 30E of U.S. |
| | | K409F, T411E | Y407A | 2016/0355600 |
| Fc 137 | Heterodimerization | L351K | L351E | FIG. 30E of U.S. |
| | | | | 2016/0355600 |
| Fc 138 | Heterodimerization | I199T, N203D, | Q196K, L199T, | FIG. 30E of U.S. |
| | | K247Q, R355Q, | P217R, P228R, | 2016/0355600 |
| | | Q419E, K447 | N276K | |
| Fc 139 | Heterodimerization | I199T, | Q196K, I199T, | FIG. 30E of U.S. |
| | | N203D ,K247Q, | N276K | 2016/0355600 |
| | | R355Q, Q419E, | | |
| | | K447 | | |
| Fc 140 | Heterodimerization | I199T, N203D, | | FIG. 30E of U.S. |
| | | K274Q, R355Q, | | 2016/0355600 |
| | | N384S, K392N, | | |
| | | V397M, Q419E | | |
| | | DEL447 | | |
| Fc 141 | Heterodimerization | N208D, Q295E | | FIG. 30E of U.S. |
| | | N384D, Q418E | | 2016/0355600 |
| | | N421D | | |
| Fc 142 | Heterodimerization | N208D, Q295E | | FIG. 30E of U.S. |
| | | Q418E, N421D | | 2016/0355600 |
| Fc 143 | Heterodimerization | Q196K, I199T | | FIG. 30E of U.S. |
| | | P217R, P228R | | 2016/0355600 |
| | | N276K | | |
| Fc 144 | Heterodimerization | Q196K, I199T | | FIG. 30E of U.S. |
| | | N276K | | 2016/0355600 |
| Fc 145 | Heterodimerization | E269Q, E272Q | | FIG. 30E of U.S. |
| | | E283Q, E357Q | | 2016/0355600 |
| Fc 146 | Heterodimerization | E269Q, E272Q | | FIG. 30E of U.S. |
| | | E283Q, | | 2016/0355600 |
| Fc 147 | Heterodimerization | E269Q, E272Q | | FIG. 30E of U.S. |
| | | | | 2016/0355600 |
| Fc 148 | Heterodimerization | E269Q, E283Q | | FIG. 30E of U.S. |
| | | | | 2016/0355600 |
| Fc 149 | Heterodimerization | E272Q, E283Q | | FIG. 30E of U.S. |
| | | | | 2016/0355600 |
| Fc 150 | Heterodimerization | E269Q | | FIG. 30E of U.S. |
| | | | | z2016/0355600 |

[0260] 6.3.1.5.1. Knob-in-Hole (KIH)

[0261] TBMs of the disclosure may comprise one or more, e.g., a plurality, of modifications to one or more of the constant domains of an Fc domain, e.g., to the CH3 domains. In one example, a TBM of the present disclosure comprises two polypeptides that each comprise a heavy chain constant domain of an antibody, e.g., a CH2 or CH3 domain. In an example, the two heavy chain constant domains, e.g., the CH2 or CH3 domains of the TBM comprise one or more modifications that allow for a heterodimeric association between the two chains. In one aspect, the one or more modifications are disposed on CH2 domains of the two heavy chains. In one aspect, the one or more modifications are disposed on CH3 domains of at least two polypeptides of the TBM. In one aspect, the one or more modifications to a first polypeptide of the TBM comprising a heavy chain constant domain can create a “knob” and the one or more modifications to a second polypeptide of the TBM creates a “hole,” such that heterodimerization of the polypeptide of the TBM comprising a heavy chain constant domain causes the “knob” to interface (e.g., interact, e.g., a CH2 domain of a first polypeptide interacting with a CH2 domain of a second polypeptide, or a CH3 domain of a first polypeptide interacting with a CH3 domain of a second polypeptide) with the “hole.” As the term is used herein, a “knob” refers to at least one amino acid side chain which projects from the interface of a first polypeptide of the TBM comprising a heavy chain constant domain and is therefore positionable in a compensatory “hole” in the interface with a second polypeptide of the TBM comprising a heavy chain constant domain so as to stabilize the heteromultimer, and thereby favor heteromultimer formation over homomultimer formation, for example. The knob may exist in the original interface or may be introduced synthetically (e.g. by altering nucleic acid encoding the interface). The preferred import residues for the formation of a knob are generally naturally occurring amino acid residues and are preferably selected from arginine (R), phenylalanine (F), tyrosine (Y) and tryptophan (W). Most preferred are tryptophan and tyrosine. In the preferred embodiment, the original residue for the formation of the protuberance has a small side chain volume, such as alanine, asparagine, aspartic acid, glycine, serine, threonine or valine.

[0262] A “hole” refers to at least one amino acid side chain which is recessed from the interface of a second polypeptide of the TBM comprising a heavy chain constant domain and therefore accommodates a corresponding knob on the adjacent interfacing surface of a first polypeptide of the TBM comprising a heavy chain constant domain. The hole may exist in the original interface or may be introduced synthetically (e.g. by altering nucleic acid encoding the interface). The preferred import residues for the formation of a hole are usually naturally occurring amino acid residues and are preferably selected from alanine (A), serine (S), threonine (T) and valine (V). Most preferred are serine, alanine or threonine. In the preferred embodiment, the original residue for the formation of the hole has a large side chain volume, such as tyrosine, arginine, phenylalanine or tryptophan.

[0263] In a preferred embodiment, a first CH3 domain is modified at residue 366, 405 or 407 to create either a “knob” or a hole” (as described above), and the second CH3 domain that heterodimerizes with the first CH3 domain is modified at: residue 407 if residue 366 is modified in the first CH3 domain, residue 394 if residue 405 is modified in the first CH3 domain, or residue 366 if residue 407 is modified in the first CH3 domain to create a “hole” or “knob” complementary to the “knob” or “hole” of the first CH3 domain.

[0264] In another preferred embodiment, a first CH3 domain is modified at residue 366, and the second CH3 domain that heterodimerizes with the first CH3 domain is modified at residues 366, 368 and/or 407, to create a “hole” or “knob” complementary to the “knob” or “hole” of the first CH3 domain. In one embodiment, the modification to the first CH3 domain introduces a tyrosine (Y) residue at position 366. In an embodiment, the modification to the first CH3 is T366Y. In one embodiment, the modification to the first CH3 domain introduces a tryptophan (W) residue at position 366. In an embodiment, the modification to the first CH3 is T366W. In some embodiments, the modification to the second CH3 domain that heterodimerizes with the first CH3 domain modified at position 366 (e.g., has a tyrosine (Y) or tryptophan (W) introduced at position 366, e.g., comprises the modification T366Y or T366W), comprises a modification at position 366, a modification at position 368 and a modification at position 407. In some embodiments, the modification at position 366 introduces a serine (S) residue, the modification at position 368 introduces an alanine (A), and the modification at position 407 introduces a valine (V). In some embodiments, the modifications comprise T366S, L368A and Y407V. In one embodiment the first CH3 domain of the multispecific molecule comprises the modification T366Y, and the second CH3 domain that heterodimerizes with the first CH3 domain comprises the modifications T366S, L368A and Y407V, or vice versa. In one embodiment the first CH3 domain of the multispecific molecule comprises the modification T366W, and the second CH3 domain that heterodimerizes with the first CH3 domain comprises the modifications T366S, L368A and Y407V, or vice versa.

[0265] Additional steric or “skew” (e.g., knob in hole) modifications are described in PCT publication no. WO2014/145806 (for example, FIG. 3, FIG. 4 and FIG. 12 of WO2014/145806), PCT publication no. WO2014/110601, and PCT publication no. WO 2016/086186, WO 2016/086189, WO 2016/086196 and WO 2016/182751 the contents of which are incorporated herein in their entireties. An example of a KIH variant comprises a first constant chain comprising a L368D and a K370S modification, paired with a second constant chain comprising a S364K and E357Q modification.

[0266] Additional knob in hole modification pairs suitable for use in any of the multispecific molecules of the present disclosure are further described in, for example, WO1996/027011, and Merchant et al., 1998, Nat. Biotechnol., 16:677-681, the contents of which are hereby incorporated by reference in their entirety.

[0267] In further embodiments, the CH3 domains may be additionally modified to introduce a pair of cysteine residues. Without being bound by theory, it is believed that the introduction of a pair of cysteine residues capable of forming a disulfide bond provide stability to heterodimerized TBMs comprising paired CH3 domains. In some embodiments, the first CH3 domain comprises a cysteine at position 354, and the second CH3 domain that heterodimerizes with the first CH3 domain comprises a cysteine at position 349. In some embodiments, the first CH3 domain comprises a cysteine at position 354 (e.g., comprises the modification S354C) and a tyrosine (Y) at position 366 (e.g., comprises the modification T366Y), and the second CH3 domain that heterodimerizes with the first CH3 domain comprises a cysteine at position 349 (e.g., comprises the modification Y349C), a serine at position 366 (e.g., comprises the modification T366S), an alanine at position 368 (e.g., comprises the modification L368A), and a valine at position 407 (e.g., comprises the modification Y407V). In some embodiments, the first CH3 domain comprises a cysteine at position 354 (e.g., comprises the modification S354C) and a tryptophan (W) at position 366 (e.g., comprises the modification T366W), and the second CH3 domain that heterodimerizes with the first CH3 domain comprises a cysteine at position 349 (e.g., comprises the modification Y349C), a serine at position 366 (e.g., comprises the modification T366S), an alanine at position 368 (e.g., comprises the modification L368A), and a valine at position 407 (e.g., comprises the modification Y407V).

[0268] 6.3.1.5.2. Alternative Knob and Hole: IgG Heterodimerization

[0269] Heterodimerization of polypeptide chains of a TBM comprising paired CH3 domains can be increased by introducing one or more modifications in a CH3 domain which is derived from the IgG1 antibody class. In an embodiment, the modifications comprise a K409R modification to one CH3 domain paired with F405L modification in the second CH3 domain. Additional modifications may also, or alternatively, be at positions 366, 368, 370, 399, 405, 407, and 409. Preferably, heterodimerization of polypeptides comprising such modifications is achieved under reducing conditions, e.g., 10-100 mM 2-MEA (e.g., 25, 50, or 100 mM 2-MEA) for 1-10, e.g., 1.5-5, e.g., 5, hours at 25-37 C, e.g., 25 C or 37 C.

[0270] The amino acid replacements described herein can be introduced into the CH3 domains using techniques which are well known in the art (see, e.g., McPherson, ed., 1991, Directed Mutagenesis: a Practical Approach; Adelman et al., 1983, DNA, 2:183).

[0271] The IgG heterodimerization strategy is further described in, for example, WO2008/119353, WO2011/131746, and WO2013/060867, the contents of which are hereby incorporated by reference in their entirety.

[0272] In any of the embodiments described in this Section, the CH3 domains can be additionally modified to introduce a pair of cysteine residues as described in Section 6.3.1.5.1.

[0273] 6.3.1.5.3. Polar Bridge

[0274] Heterodimerization of polypeptide chains of TBMs comprising an Fc domain can be increased by introducing modifications based on the “polar-bridging” rationale, which is to make residues at the binding interface of the two polypeptide chains to interact with residues of similar (or complimentary) physical property in the heterodimer configuration, while with residues of different physical property in the homodimer configuration. In particular, these modifications are designed so that, in the heterodimer formation, polar residues interact with polar residues, while hydrophobic residues interact with hydrophobic residues. In contrast, in the homodimer formation, residues are modified so that polar residues interact with hydrophobic residues. The favorable interactions in the heterodimer configuration and the unfavorable interactions in the homodimer configuration work together to make it more likely for Fc regions to form heterodimers than to form homodimers.

[0275] In an exemplary embodiment, the above modifications are generated at one or more positions of residues 364, 368, 399, 405, 409, and 411 of a CH3 domain.

[0276] In some embodiments, one or more modifications selected from S364L, T366V, L368Q, N399K, F405S, K409F and R411K are introduced into one of the two CH3 domains. One or more modifications selected from Y407F, K409Q and T411N can be introduced into the second CH3 domain.

[0277] In another embodiment, one or more modifications selected from a group consisting of S364L, T366V, L368Q, D399K, F405S, K409F and T411K are introduced into one CH3 domain, while one or more modifications selected from Y407F, K409Q and T411D are introduced into the second CH3 domain.

[0278] In one exemplary embodiment, the original residue of threonine at position 366 of one CH3 domain is replaced by valine, while the original residue of tyrosine at position 407 of the other CH3 domain is replaced by phenylalanine.

[0279] In another exemplary embodiment, the original residue of serine at position 364 of one CH3 domain is replaced by leucine, while the original residue of leucine at position 368 of the same CH3 domain is replaced by glutamine.

[0280] In yet another exemplary embodiment, the original residue of phenylalanine at position 405 of one CH3 domain is replaced by serine and the original residue of lysine at position 409 of this CH3 domain is replaced by phenylalanine, while the original residue of lysine at position 409 of the other CH3 domain is replaced by glutamine.

[0281] In yet another exemplary embodiment, the original residue of aspartic acid at position 399 of one CH3 domain is replaced by lysine, and the original residue of threonine at position 411 of the same CH3 domain is replaced by lysine, while the original residue of threonine at position 411 of the other CH3 domain is replaced by aspartic acid.

[0282] The amino acid replacements described herein can be introduced into the CH3 domains using techniques which are well known in the art (see, e.g., McPherson, ed., 1991, Directed Mutagenesis: a Practical Approach; Adelman et al., 1983, DNA, 2:183). The polar bridge strategy is described in, for example, WO2006/106905, WO2009/089004 and K. Gunasekaran, et al. (2010) The Journal of Biological Chemistry, 285:19637-19646, the contents of which are hereby incorporated by reference in their entirety.

[0283] Additional polar bridge modifications are described in, for example, PCT publication no. WO2014/145806 (for example, FIG. 6 of WO2014/145806), PCT publication no. WO2014/110601, and PCT publication no. WO 2016/086186, WO 2016/086189, WO 2016/086196 and WO 2016/182751 the contents of which are incorporated herein in their entireties. An example of a polar bridge variant comprises a constant chain comprising a N208D, Q295E, N384D, Q418E and N421D modification.

[0284] In any of the embodiments described herein, the CH3 domains may be additionally modified to introduce a pair of cysteine residues as described in Section 6.3.1.5.1.

[0285] Additional strategies for enhancing heterodimerization are described in, for example, WO2016/105450, WO2016/086186, WO2016/086189, WO2016/086196, WO2016/141378, and WO2014/145806, and WO2014/110601, the entire contents of each of which is hereby incorporated by reference in its entirety. Any of said strategies can be employed in a TBM described herein.

[0286] 6.3.2. Hinge Regions

[0287] The TBMs of the disclosure can also comprise hinge regions, e.g., connecting an antigen-binding module to an Fc region. The hinge region can be a native or a modified hinge region. Hinge regions are typically found at the N-termini of Fc regions.

[0288] A native hinge region is the hinge region that would normally be found between Fab and Fc domains in a naturally occurring antibody. A modified hinge region is any hinge that differs in length and/or composition from the native hinge region. Such hinges can include hinge regions from other species, such as human, mouse, rat, rabbit, shark, pig, hamster, camel, llama or goat hinge regions. Other modified hinge regions may comprise a complete hinge region derived from an antibody of a different class or subclass from that of the heavy chain Fc region. Alternatively, the modified hinge region may comprise part of a natural hinge or a repeating unit in which each unit in the repeat is derived from a natural hinge region. In a further alternative, the natural hinge region may be altered by converting one or more cysteine or other residues into neutral residues, such as serine or alanine, or by converting suitably placed residues into cysteine residues. By such means the number of cysteine residues in the hinge region may be increased or decreased. Other modified hinge regions may be entirely synthetic and may be designed to possess desired properties such as length, cysteine composition and flexibility.

[0289] A number of modified hinge regions have already been described for example, in U.S. Pat. No. 5,677,425, WO9915549, WO2005003170, WO2005003169, WO2005003170, WO9825971 and WO2005003171 and these are incorporated herein by reference.

[0290] Examples of suitable hinge sequences are shown in Table 3.

TABLE 3
Hinge Sequences

| Hinge | Hinge | | SEQ ID |
|---|---|---|---|
| Name | Description | Hinge Sequence | NO: |
| H1 | Human IgA1 | VPSTPPTPSPSTPPTPSPS | 4 |
| H2 | Human IgA2 | VPPPPP | 5 |
| H3 | Human IgD | ESPKAQASSVPTAQPQAEGS | 6 |
| | | LAKATTAPATTRNTGRGGEE | |
| | | KKKEKEKEEQEERETKTP | |
| H4 | Human IgG1 | EPKSCDKTHTCPPCP | 7 |
| H5 | Human IgG2 | ERKCCVECPPCP | 8 |
| H6 | Human IgG3 | ELKTPLGDTTHTCPRCPEPK | 9 |
| | | SCDTPPPCPRCPEPKSCDTP | |
| | | PPCPRCPEPKSCDTPPPCPR | |
| | | CP | |
| H7 | Human IgG4 | ESKYGPPCPSCP | 10 |
| H8 | Human IgG4(P) | ESKYGPPCPPCP | 11 |
| H9 | Engineered v1 | CPPC | 2 |
| H10 | Engineered v2 | CPSC | 12 |
| H11 | Engineered v3 | CPRC | 13 |
| H12 | Engineered v4 | SPPC | 14 |
| H13 | Engineered v5 | CPPS | 15 |
| H14 | Engineered v6 | SPPS | 3 |
| H15 | Engineered v7 | DKTHTCAA | 16 |
| H16 | Engineered v8 | DKTHTCPPCPA | 17 |
| H17 | Engineered v9 | DKTHTCPPCPATCPPCPA | 18 |
| H18 | Engineered v10 | DKTHTCPPCPATCPPCPATC | 19 |
| | | PPCPA | |
| H19 | Engineered v11 | DKTHTCPPCPAGKPTLYNSL | 20 |
| | | VMSDTAGTCY | |
| H20 | Engineered v12 | DKTHTCPPCPAGKPTHVNVS | 21 |
| | | VVMAEVDGTCY | |
| H21 | Engineered v13 | DKTHTCCVECPPCPA | 22 |
| H22 | Engineered v14 | DKTHTCPRCPEPKSCDTPPP | 23 |
| | | CPRCPA | |
| H23 | Engineered v15 | DKTHTCPSCPA | 24 |

[0291] In one embodiment, the heavy chain Fc region possesses an intact hinge region at its N-terminus.

[0292] In one embodiment the heavy chain Fc region and hinge region are derived from IgG4 and the hinge region comprises the modified sequence CPPC (SEQ ID NO: 2). The core hinge region of human IgG4 contains the sequence CPSC (SEQ ID NO: 12) compared to IgG1 which contains the sequence CPPC (SEQ ID NO: 2). The serine residue present in the IgG4 sequence leads to increased flexibility in this region, and therefore a proportion of molecules form disulfide bonds within the same protein chain (an intrachain disulfide) rather than bridging to the other heavy chain in the IgG molecule to form the interchain disulfide. (Angel et al., 1993, Mol Immunol 30(1):105-108). Changing the serine residue to a proline to give the same core sequence as IgG1 allows complete formation of inter-chain disulfides in the IgG4 hinge region, thus reducing heterogeneity in the purified product. This altered isotype is termed IgG4P.

[0293] 6.3.3. ABM Linkers

[0294] In certain aspects, the present disclosure provides TBMs comprising at least three ABMs, wherein two or more components of an ABM (e.g., a VH and a VL of an scFv), two or more ABMs, or an ABM and a non-ABM domain (e.g., a dimerization domain such as an Fc region) are connected to one another by a peptide linker. Such linkers are referred to herein an “ABM linkers”, as opposed to the ADC linkers used to attach drugs to TBMs as described, for example, in Section 6.9.2.

[0295] A peptide linker can range from 2 amino acids to 60 or more amino acids, and in certain aspects a peptide linker ranges from 3 amino acids to 50 amino acids, from 4 to 30 amino acids, from 5 to 25 amino acids, from 10 to 25 amino acids or from 12 to 20 amino acids. In particular embodiments, a peptide linker is 2 amino acids, 3 amino acids, 4 amino acid, 5 amino acids, 6 amino acids, 7 amino acids, 8 amino acids, 9 amino acids, 10 amino acids, 11 amino acids, 12 amino acids, 13 amino acids, 14 amino acid, 15 amino acids, 16 amino acids, 17 amino acids, 18 amino acids, 19 amino acids, 20 amino acids, 21 amino acids, 22 amino acids, 23 amino acids, 24 amino acid, 25 amino acids, 26 amino acids, 27 amino acids, 28 amino acids, 29 amino acids, 30 amino acids, 31 amino acids, 32 amino acids, 33 amino acids, 34 amino acid, 35 amino acids, 36 amino acids, 37 amino acids, 38 amino acids, 39 amino acids, 40 amino acids, 41 amino acids, 42 amino acids, 43 amino acids, 44 amino acid, 45 amino acids, 46 amino acids, 47 amino acids, 48 amino acids, 49 amino acids, or 50 amino acids in length.

[0296] Charged and/or flexible linkers are particularly preferred.

[0297] Examples of flexible ABM linkers that can be used in the TBMs of the disclosure include those disclosed by Chen et al., 2013, Adv Drug Deliv Rev. 65(10):1357-1369 and Klein et al., 2014, Protein Engineering, Design & Selection 27(10):325-330. A particularly useful flexible linker is (GGGGS)n (SEQ ID NO: 25) (also referred to as (G4S)n (SEQ ID NO: 25)). In some embodiments, n is any number between 1 and 10, i.e., 1, 2, 3, 4, 5, 6, 7, 8, 9, and 10, or any range bounded by any two of the foregoing numbers, e.g., 1 to 5, 2 to 5, 3 to 6, 2 to 4, 1 to 4, and so on and so forth.

[0298] Other examples of suitable TBM linkers for use in the TBMs of the present disclosure are shown in Table 4 below:

TABLE 4
ABM Linker Sequences

| Linker | | SEQ ID |
|---|---|---|
| Name | Linker Sequence | NO: |
| L1 | ADAAP | 26 |
| L2 | ADAAPTVSIFP | 27 |
| L3 | ADAAPTVSIFPP | 28 |
| L4 | AKTTAP | 29 |
| L5 | AKTTAPSVYPLAP | 30 |
| L6 | AKTTPKLEEGEFSEARV | 31 |
| L7 | AKTTPKLGG | 32 |
| L8 | AKTTPP | 33 |
| L9 | AKTTPPSVTPLAP | 34 |
| L10 | ASTKGP | 35 |
| L11 | ASTKGPSVFPLAP | 36 |
| L12 | ASTKGPSVFPLAPASTKGPSVFPLAP | 37 |
| L13 | EGKSSGSGSESKST | 38 |
| L14 | GEGESGEGESGEGES | 39 |
| L15 | GEGESGEGESGEGESGEGES | 40 |
| L16 | GEGGSGEGGSGEGGS | 41 |
| L17 | GENKVEYAPALMALS | 42 |
| L18 | GGEGSGGEGSGGEGS | 43 |
| L19 | GGGESGGEGSGEGGS | 44 |
| L20 | GGGESGGGESGGGES | 45 |
| L21 | (GGGGS)ₙ (also referred to as | 46 |
| | (G4S)ₙ), wherein n can be 1-10. | |
| L22 | GGGGSGGGGS | 47 |
| L23 | GGGGSGGGGSGGGGS | 1 |
| L24 | GGGGSGGGGSGGGGSGGGGS | 48 |
| L25 | GGGKSGGGKSGGGKS | 49 |
| L26 | GGGKSGGKGSGKGGS | 50 |
| L27 | GGKGSGGKGSGGKGS | 51 |
| L28 | GGSGG | 52 |
| L29 | GGSGGGGSG | 53 |
| L30 | GGSGGGGSGGGGS | 54 |
| L31 | GHEAAAVMQVQYPAS | 55 |
| L32 | GKGGSGKGGSGKGGS | 56 |
| L33 | GKGKSGKGKSGKGKS | 57 |
| L34 | GKGKSGKGKSGKGKSGKGKS | 58 |
| L35 | GKPGSGKPGSGKPGS | 59 |
| L36 | GKPGSGKPGSGKPGSGKPGS | 60 |
| L37 | GPAKELTPLKEAKVS | 61 |
| L38 | GSAGSAAGSGEF | 62 |
| L39 | IRPRAIGGSKPRVA | 63 |
| L40 | KESGSVSSEQLAQFRSLD | 64 |
| L41 | KTTPKLEEGEFSEAR | 65 |
| L42 | QPKAAP | 66 |
| L43 | QPKAAPSVTLFPP | 67 |
| L44 | RADAAAA(G4S)₄ | 68 |
| L45 | RADAAAAGGPGS | 69 |
| L46 | RADAAP | 70 |
| L47 | RADAAPTVS | 71 |
| L48 | SAKTTP | 72 |
| L49 | SAKTTPKLEEGEFSEARV | 73 |
| L50 | SAKTTPKLGG | 74 |
| L51 | STAGDTHLGGEDFD | 75 |
| L52 | TVAAP | 76 |
| L53 | TVAAPSVFIFPP | 77 |
| L54 | TVAAPSVFIFPPTVAAPSVFIFPP | 78 |

[0299] In various aspects, the disclosure provides a TBM which comprises one or more ABM linkers. Each of the ABM linkers can be range from 2 amino acids to 60 amino acids in length, preferably 4 to 30 amino acids, from 5 to 25 amino acids, from 10 to 25 amino acids or from 12 to 20 amino acids in length, optionally selected from Table 4 above. In particular embodiments, the TBM comprises two, three, four, five or six ABM linkers. The ABM linkers can be on one, two, three, four or even more polypeptide chains of the TBM.

[0300] 6.4. Exemplary Trispecific Binding Molecules

[0301] Exemplary TBM configurations are shown in FIG. 1. FIG. 1A shows the components of the TBM configurations shown in FIGS. 1B-1Z. The scFv, Fab, non-immunoglobulin based ABM, and Fc each can have the characteristics described for these components in Sections 6.2 and 6.3. The components of the TBM configurations shown in FIG. 1 can be associated with each other by any of the means described in Sections 6.2 and 6.3 (e.g., by direct bonds, ABM linkers, disulfide bonds, Fc domains with modified with knob in hole interactions, etc.). The orientations and associations of the various components shown in FIG. 1 are merely exemplary; as will be appreciated by skilled artisans, other orientations and associations may be suitable (e.g., as described in Sections 6.2 and 6.3).

[0302] TBMs of the disclosure are not limited to the configurations shown in FIG. 1. Other configurations that may be used are known to those skilled in the art. See, e.g., WO 2014/145806; WO 2017/124002; Liu et al., 2017, Front Immunol. 8:38; Brinkmann & Kontermann, 2017, mAbs 9:2, 182-212; US 2016/0355600; Klein et al., 2016, MAbs 8(6):1010-20; and US 2017/0145116.

[0303] 6.4.1. Exemplary Trivalent TBMs

[0304] The TBMs of the disclosure can be trivalent, i.e., they have three antigen-binding domains, each of which binds one of CD2, a component of a TCR complex and TAA.

[0305] Exemplary trivalent TBM configurations are shown in FIGS. 1B through 1O and FIGS. 1V-1Z.

[0306] As depicted in FIGS. 1B-1K, 10 and 1V-1Z, a TBM can comprise two half antibodies, one comprising two ABMs and the other comprising one ABM, the two halves paired through an Fc domain.

[0307] In the embodiment of FIG. 1B, the first (or left) half antibody comprises an scFv and an Fc region, and the second (or right) half antibody comprises a Fab, an scFv and an Fc region. The first and second half antibodies are associated through the Fc regions forming an Fc domain.

[0308] In the embodiment of FIG. 1C, the first (or left) half antibody comprises two Fab and an Fc region, and the second (or right) half antibody comprises a Fab and an Fc region. The first and second half antibodies are associated through the Fc regions forming an Fc domain.

[0309] In the embodiment of FIG. 1D, the first (or left) half antibody comprises a Fab, an scFv and an Fc region, and the second (or right) half antibody comprises a Fab and an Fc region. The first and second half antibodies are associated through the Fc regions forming an Fc domain.

[0310] In the embodiment of FIG. 1E, the first (or left) half antibody comprises an scFv and an Fc region, and the second (or right) half antibody comprises two Fab and an Fc region. The first and second half antibodies are associated through the Fc regions forming an Fc domain.

[0311] In the embodiment of FIG. 1F, the first (or left) half antibody comprises an scFv, an Fc region, and a Fab, and the second (or right) half antibody comprises a Fab and an Fc region. The first and second half antibodies are associated through the Fc regions forming an Fc domain.

[0312] In the embodiment of FIG. 1G, the first (or left) half antibody comprises an scFv and an Fc region, and the second (or right) half antibody comprises a Fab an Fc region, and an scFV. The first and second half antibodies are associated through the Fc regions forming an Fc domain.

[0313] In the embodiment of FIG. 1H, the first (or left) half antibody comprises two Fab and an Fc region, and the second (or right) half antibody comprises a non-immunoglobulin based ABM and an Fc region. The first and second half antibodies are associated through the Fc regions forming an Fc domain.

[0314] In the embodiment of FIG. 1I, the first (or left) half antibody comprises a Fab, an scFv, and an Fc region, and the second (or right) half antibody comprises a non-immunoglobulin based ABM and an Fc region. The first and second half antibodies are associated through the Fc regions forming an Fc domain.

[0315] In the embodiment of FIG. 1J, the first (or left) half antibody comprises a Fab and an Fc region, and the second (or right) half antibody comprises an scFv, a non-immunoglobulin based ABM and an Fc region. The first and second half antibodies are associated through the Fc regions forming an Fc domain.

[0316] In the embodiment of FIG. 1K, the first (or left) half antibody comprises an scFv and an Fc region, and the second (or right) half antibody comprises an scFv, an Fc region, and a second scFv. The first and second half antibodies are associated through the Fc regions forming an Fc domain.

[0317] In the embodiment of FIG. 1N, the first (or left) half antibody comprises a Fab, an Fc region, and an scFv, and the second (or right) half antibody comprises a Fab, and an Fc region. The first and second half antibodies are associated through the Fc regions forming an Fc domain.

[0318] In the embodiment of FIG. 1O, the first (or left) half antibody comprises a Fab, an Fc region, and a scFab, and the second (or right) half antibody comprises a Fab and an Fc region. The first and second half antibodies are associated through the Fc regions forming an Fc domain.

[0319] In the embodiment of FIG. 1V, the first (or left) half antibody comprises a non-immunoglobulin based ABM, an Fab and an Fc region, and the second (or right) half antibody comprises an Fab and an Fc region. The first and second half antibodies are associated through the Fc regions forming an Fc domain.

[0320] In the embodiment of FIG. 1W, the first (or left) half antibody comprises a non-immunoglobulin based ABM, an scFv and an Fc region, and the second (or right) half antibody comprises an Fab and an Fc region. The first and second half antibodies are associated through the Fc regions forming an Fc domain.

[0321] In the embodiment of FIG. 1X, the first (or left) half antibody comprises an scFv, an Fc region and a non-immunoglobulin based ABM on the C-terminal end of the Fc region, and the second (or right) half antibody comprises an Fab and an Fc region. The first and second half antibodies are associated through the Fc regions forming an Fc domain.

[0322] In the embodiment of FIG. 1Y, the first (or left) half antibody comprises an scFv, an Fc region and an scFv on the C-terminal end of the Fc region, and the second (or right) half antibody comprises non-immunoglobulin based ABM and an Fc region. The first and second half antibodies are associated through the Fc regions forming an Fc domain.

[0323] In the embodiment of FIG. 1Z, the first (or left) half antibody comprises an scFv, an Fc region and an Fab on the C-terminal end of the Fc region, and the second (or right) half antibody comprises non-immunoglobulin based ABM and an Fc region. The first and second half antibodies are associated through the Fc regions forming an Fc domain.

[0324] Alternatively, as depicted in FIG. 1L, trivalent a TBM can comprise two half antibodies, each comprising one complete ABM and a portion of another ABM (one a VH, the other a VL). The two half antibodies are paired through an Fc domain, whereupon the VH and the VL associate to form a complete antigen-binding Fv domain.

[0325] The TBM can be a single chain, as shown in FIG. 1M. The TBM of FIG. 1M comprises three scFv domains connected through linkers.

[0326] In each of the configurations shown in FIGS. 1B-1O and 1V-Z, each of the domains designated X, Y, and Z represents a TCR ABM, a CD2 ABM, or a TAA ABM, although not necessarily in that order. In order words, X can be a TCR ABM, a CD2 ABM, or TAA ABM, Y can be a TCR ABM, a CD2 ABM, or a TAA ABM, and Z can be a CD2 ABM, a TCR ABM, or a TAA ABM, provided that the TBM comprises at least one TCR ABM, at least one CD2 ABM, and at least one TAA ABM.

[0327] Accordingly, in the present disclosure provides a trivalent TBM as shown in any one of FIGS. 1B through 1O and 1V through Z, wherein X is a CD2 ABM, Y is a TCR ABM and Z is a TAA ABM (this configuration of ABMs designated as “T1” for convenience).

[0328] The present disclosure also provides a trivalent TBM as shown in any one of FIGS. 1B through 1O and 1V through Z, wherein X is a CD2 ABM, Y is a TAA ABM, and Z is a TCR ABM (this configuration of ABMs designated as “T2” for convenience).

[0329] The present disclosure further provides a trivalent TBM as shown in any one of FIGS. 1B through 1O and 1V through Z, wherein X is a TCR ABM, Y is a CD2 ABM, and Z is a TAA ABM (this configuration of ABMs designated as “T3” for convenience).

[0330] The present disclosure yet further provides a trivalent TBM as shown in any one of FIGS. 1B through 1O and 1V through Z, wherein X is a TCR ABM, Y is a TAA ABM, and Z is a CD2 ABM (this configuration of ABMs designated as “T4” for convenience).

[0331] The present disclosure yet further provides a trivalent TBM as shown in any one of FIGS. 1B through 1O and 1V through Z, wherein X is a TAA ABM, Y is a CD2 ABM, and Z is a TCR ABM (this configuration of ABMs designated as “T5” for convenience).

[0332] The present disclosure yet further provides a trivalent TBM as shown in any one of FIGS. 1B through 1O and 1V through Z, wherein X is a TAA ABM, Y is a TCR ABM, and Z is a CD2 ABM (this configuration of ABMs designated as “T6” for convenience).

[0333] 6.4.2. Exemplary Tetravalent TBMs

[0334] The TBMs of the disclosure can be tetravalent, i.e., they have four antigen-binding domains, one or two of which binds CD2, one or two of which binds a component of a TCR complex, and one or two of which binds TAA.

[0335] Exemplary tetravalent TBM configurations are shown in FIGS. 1P-1R.

[0336] As depicted in FIGS. 1P-1R, a tetravalent TBM can comprise two half antibodies, each comprising two complete ABMs, the two halves paired through an Fc domain.

[0337] In the embodiment of FIG. 1P, the first (or left) half antibody comprises a Fab, an Fc region, and a second Fab, and the second (or right) half antibody comprises a Fab, an Fc region, and a second Fab. The first and second half antibodies are associated through the Fc regions forming an Fc domain.

[0338] In the embodiment of FIG. 1Q, the first (or left) half antibody comprises a Fab, an Fc region, and an scFv, and the second (or right) half antibody comprises a Fab, an Fc region, and an scFv. The first and second half antibodies are associated through the Fc regions forming an Fc domain.

[0339] In the embodiment of FIG. 1R, the first (or left) half antibody comprises a Fab, an Fc region, and an scFv, and the second (or right) half antibody comprises an scFv, an Fc region, and a Fab. The first and second half antibodies are associated through the Fc regions forming an Fc domain.

[0340] In the configuration shown in FIGS. 1P-1R, each of X, Y, Z, and A represent a TCR ABM, a CD2 ABM, or a TAA ABM, although not necessarily in that order, and provided that the TBM comprises at least one TCR ABM, one CD2 ABM, and one TAA ABM. Thus, the tetravalent ABMs of the disclosure will include two ABMs against one of a component of a TCR complex, CD2 and TAA. Preferably, a tetravalent TBM has two TAA ABMs.

[0341] Accordingly, in the present disclosure provides a tetravalent TBM as shown in any one of FIGS. 1P-1R, wherein X is a CD2 ABM, Y is a TCR ABM and both Z and A are TAA ABMs (this configuration of ABMs designated as “Tv 1” for convenience).

[0342] The disclosure further provides a tetravalent TBM as shown in any one of FIGS. 1P-1R, wherein X is a CD2 ABM, both Y and A are TAA ABMs, and Z is a TCR ABM (this configuration of ABMs designated as “Tv 2” for convenience).

[0343] The disclosure yet further provides a tetravalent TBM as shown in any one of FIGS. 1P-1R, wherein X is a TCR ABM, Y is a CD2 ABM, and both Z and A are TAA ABMs (this configuration of ABMs designated as “Tv 3” for convenience).

[0344] The disclosure further provides a tetravalent TBM as shown in any one of FIGS. 1P-1R, wherein, X is a TCR ABM, both Y and A are TAA ABMs, and Z is a CD2 ABM (this configuration of ABMs designated as “Tv 4” for convenience).

[0345] The disclosure further provides a tetravalent TBM as shown in any one of FIGS. 1P-1R, wherein both X and A are TAA ABMs, Y is a CD2 ABM, and Z is a TCR ABM (this configuration of ABMs designated as “Tv 5” for convenience).

[0346] The disclosure further provides a tetravalent TBM as shown in any one of FIGS. 1P-1R, wherein both X and A are TAA ABMs, Y is a TCR ABM, and Z is a CD2 ABM (this configuration of ABMs designated as “Tv 6” for convenience).

[0347] The disclosure further provides a tetravalent TBM as shown in any one of FIGS. 1P-1R, wherein X is a CD2 ABM, both Y and Z are CD2 ABMs, and Z is a TCR ABM (this configuration of ABMs designated as “Tv 7” for convenience).

[0348] The disclosure further provides a tetravalent TBM as shown in any one of FIGS. 1P-1R, wherein both X and Z are TAA ABMs, Y is a CD2 ABM, and A is a TCR ABM (this configuration of ABMs designated as “Tv 8” for convenience).

[0349] The disclosure further provides a tetravalent TBM as shown in any one of FIGS. 1P-1R, wherein X is a TCR ABM, both Y and A are TAA ABMs, and Z is a CD2 ABM (this configuration of ABMs designated as “Tv 9” for convenience).

[0350] The disclosure further provides a tetravalent TBM as shown in any one of FIGS. 1P-1R, wherein both X and Y are TAA ABMs, Z is a CD2 ABM, and A is a TCR ABM (this configuration of ABMs designated as “Tv 10” for convenience).

[0351] The disclosure further provides a tetravalent TBM as shown in any one of FIGS. 1P-1R, wherein both X and Z are TAA ABMs, Y is a TCR ABM, and A is a CD2 ABM (this configuration of ABMs designated as “Tv 11” for convenience).

[0352] The disclosure further provides a tetravalent TBM as shown in any one of FIGS. 1P-1R, wherein both X and Y are TAA ABMs, Z is a TCR ABM, and A is a CD2 ABM (this configuration of ABMs designated as “Tv 12” for convenience).

[0353] 6.4.3. Exemplary Pentavalent TBMs

[0354] The TBMs of the disclosure can be pentavalent, i.e., they have five antigen-binding domains, one, two, or three of which binds CD2, one, two, or three of which binds a component of a TCR complex, and one, two, or three of which binds TAA.

[0355] An exemplary pentavalent TBM configuration is shown in FIG. 15.

[0356] As depicted in FIG. 15, a pentavalent TBM can comprise two half antibodies, one of which comprises two complete ABMs and the other of which comprises one complete ABM, the two halves paired through an Fc domain.

[0357] In the embodiment of FIG. 15, the first (or left) half antibody comprises a Fab, an scFv, and an Fc region, and the second (or right) half antibody comprises a Fab, an Fc region, and an scFv. The first and second half antibodies are associated through the Fc regions forming an Fc domain.

[0358] In the configuration shown in FIG. 15, each of X, Y, Z, A, and B represent a TCR ABM, a CD2 ABM, or a TAA ABM, although not necessarily in that order, and provided that the TBM comprises at least one TCR ABM, one CD2 ABM, and one TAA ABM. Thus, the pentavalent TBMs of the disclosure can include two ABMs against two of a component of a TCR complex, CD2 and TAA, or three ABMs against one of a component of a TCR complex, CD2 and TAA. Preferably, a pentavalent TBM has two or three TAA ABMs. In a specific embodiment, a pentavalent TBM has three TAA ABMs.

[0359] Accordingly, the present disclosure provides a pentavalent TBM as shown in FIG. 15, wherein X, Y, Z, A, and B are ABMs directed to CD2, a component of a TCR complex, and TAA as shown in Table 5.

TABLE 5
ABM Permutations in Pentavalent TBMs

| Pentavalent | | | | | |
|---|---|---|---|---|---|
| Configuration | X | Y | Z | A | B |
| Pv 1 | CD2 | CD2 | TCR | TAA | TAA |
| Pv 2 | CD2 | CD2 | TAA | TCR | TAA |
| Pv 3 | CD2 | CD2 | TAA | TAA | TCR |
| Pv 4 | CD2 | TCR | CD2 | TAA | TAA |
| Pv 5 | CD2 | TAA | CD2 | TCR | TAA |
| Pv 6 | CD2 | TAA | CD2 | TAA | TCR |
| Pv 7 | CD2 | TCR | TAA | CD2 | TAA |
| Pv 8 | CD2 | TAA | TCR | CD2 | TAA |
| Pv 9 | CD2 | TAA | TAA | CD2 | TCR |
| Pv 10 | CD2 | TCR | TAA | TAA | CD2 |
| Pv 11 | CD2 | TAA | TCR | TAA | CD2 |
| Pv 12 | CD2 | TAA | TAA | TCR | CD2 |
| Pv 13 | TCR | CD2 | CD2 | TAA | TAA |
| Pv 14 | TAA | CD2 | CD2 | TCR | TAA |
| Pv 15 | TAA | CD2 | CD2 | TAA | TCR |
| Pv 16 | TCR | CD2 | TAA | CD2 | TAA |
| Pv 17 | TAA | CD2 | TCR | CD2 | TAA |
| Pv 18 | TAA | CD2 | TAA | CD2 | TCR |
| Pv 19 | TCR | CD2 | TAA | TAA | CD2 |
| Pv 20 | TAA | CD2 | TCR | TAA | CD2 |
| Pv 21 | TAA | CD2 | TAA | TCR | CD2 |
| Pv 22 | TCR | TAA | CD2 | CD2 | TAA |
| Pv 23 | TAA | TCR | CD2 | CD2 | TAA |
| Pv 24 | TAA | TAA | CD2 | CD2 | TCR |
| Pv 25 | TCR | TAA | CD2 | TAA | CD2 |
| Pv 26 | TAA | TCR | CD2 | TAA | CD2 |
| Pv 27 | TAA | TAA | CD2 | TCR | CD2 |
| Pv P28 | TCR | TAA | TAA | CD2 | CD2 |
| Pv 29 | TAA | TCR | TAA | CD2 | CD2 |
| Pv 30 | TAA | TAA | TCR | CD2 | CD2 |
| Pv 31 | CD2 | TCR | TCR | TAA | TAA |
| Pv 32 | CD2 | TCR | TAA | TCR | TAA |
| Pv 33 | CD2 | TCR | TAA | TAA | TCR |
| Pv 34 | CD2 | TAA | TCR | TCR | TAA |
| Pv 35 | CD2 | TAA | TCR | TAA | TCR |
| Pv 36 | CD2 | TAA | TAA | TCR | TCR |
| Pv 37 | TCR | CD2 | TCR | TAA | TAA |
| Pv 38 | TCR | CD2 | TAA | TCR | TAA |
| Pv 39 | TCR | CD2 | TAA | TAA | TCR |
| Pv 40 | TAA | CD2 | TCR | TCR | TAA |
| Pv 41 | TAA | CD2 | TCR | TAA | TCR |
| Pv 42 | TAA | CD2 | TAA | TCR | TCR |
| Pv 43 | TCR | TCR | CD2 | TAA | TAA |
| Pv 44 | TCR | TAA | CD2 | TCR | TAA |
| Pv 45 | TCR | TAA | CD2 | TAA | TCR |
| Pv 46 | TAA | TCR | CD2 | TCR | TAA |
| Pv 47 | TAA | TCR | CD2 | TAA | TCR |
| Pv 48 | TAA | TAA | CD2 | TCR | TCR |
| Pv 49 | TCR | TCR | TAA | CD2 | TAA |
| Pv 50 | TCR | TAA | TCR | CD2 | TAA |
| Pv 51 | TCR | TAA | TAA | CD2 | TCR |
| Pv 52 | TAA | TCR | TCR | CD2 | TAA |
| Pv 53 | TAA | TCR | TAA | CD2 | TCR |
| Pv 54 | TAA | TAA | TCR | CD2 | TCR |
| Pv 55 | TCR | TCR | TAA | TAA | CD2 |
| Pv 56 | TCR | TAA | TCR | TAA | CD2 |
| Pv 57 | TCR | TAA | TAA | TCR | CD2 |
| Pv 58 | TAA | TCR | TCR | TAA | CD2 |
| Pv 59 | TAA | TCR | TAA | TCR | CD2 |
| Pv 60 | TAA | TAA | TCR | TCR | CD2 |
| Pv 61 | CD2 | TCR | TAA | TAA | TAA |
| Pv 62 | CD2 | TAA | TCR | TAA | TAA |
| Pv 63 | CD2 | TAA | TAA | TCR | TAA |
| Pv 64 | CD2 | TAA | TAA | TAA | TCR |
| Pv 65 | TCR | CD2 | TAA | TAA | TAA |
| Pv 66 | TAA | CD2 | TCR | TAA | TAA |
| Pv 67 | TAA | CD2 | TAA | TCR | TAA |
| Pv 68 | TAA | CD2 | TAA | TAA | TCR |
| Pv 69 | TCR | TAA | CD2 | TAA | TAA |
| Pv 70 | TAA | TCR | CD2 | TAA | TAA |
| Pv 71 | TAA | TAA | CD2 | TCR | TAA |
| Pv 72 | TAA | TAA | CD2 | TAA | TCR |
| Pv 73 | TCR | TAA | TAA | CD2 | TAA |
| Pv 74 | TAA | TCR | TAA | CD2 | TAA |
| Pv 75 | TAA | TAA | TCR | CD2 | TAA |
| Pv 76 | TAA | TAA | TAA | CD2 | TCR |
| Pv 77 | TCR | TAA | TAA | TAA | CD2 |
| Pv 78 | TAA | TCR | TAA | TAA | CD2 |
| Pv 79 | TAA | TAA | TCR | TAA | CD2 |
| Pv 80 | TAA | TAA | TAA | TCR | CD2 |

[0360] 6.4.4. Exemplary Hexavalent TBMs

[0361] The TBMs of the disclosure can be hexavalent, i.e., they have six antigen-binding domains, one, two, three, or four of which binds CD2, one, two, three, or four of which binds a component of a TCR complex, and one, two, three, or four of which binds TAA.

[0362] Exemplary hexavalent TBM configurations are shown in FIGS. 1T-1U.

[0363] As depicted in FIGS. 1T-1U, a pentavalent TBM can comprise two half antibodies, one of which comprises two complete ABMs and the other of which comprises one complete ABM, the two halves paired through an Fc domain.

[0364] In the embodiment of FIG. 1T, the first (or left) half antibody comprises a Fab, a second Fab, an Fc region, and an scFv, and the second (or right) half antibody comprises a Fab, a second Fab, an Fc region, and an scFv. The first and second half antibodies are associated through the Fc regions forming an Fc domain.

[0365] In the embodiment of FIG. 1U, the first (or left) half antibody comprises a first Fv, a second Fv, a third Fv, and an Fc region, and the second (or right) half antibody comprises a first Fv, a second Fv, a third Fv, and an Fc region. The first and second half antibodies are associated through the Fc regions forming an Fc domain.

[0366] In the configuration shown in FIGS. 1T-1U, each of X, Y, Z, A, B, and C represent a TCR ABM, a CD2 ABM, or a TAA ABM, although not necessarily in that order, and provided that the TBM comprises at least one TCR ABM, one CD2 ABM, and one TAA ABM. Thus, the hexavalent TBMs of the disclosure can include (i) two ABMs against each of a component of a TCR complex, CD2 and TAA, (ii) three ABMs against one of a component of a TCR complex, CD2 and TAA, (iii) or four ABMs against one of a component of a TCR complex, CD2, and TAA. For example, a hexavalent ABM can include three ABMs against TAA, two ABMs against CD2 and one ABM against a component of a TCR complex. As another example, a hexavalent ABM can include three ABMs against TAA, two ABMs against a component of a TCR complex and one ABM against CD2. Preferably, a hexavalent TBM has two, three, our four TAA ABMs. In a specific embodiment, a hexavalent TBM has three TAA ABMs. In other embodiments, a hexavalent TBM has four TAA ABMs.

[0367] Accordingly, in the present disclosure provides hexavalent TBMs as shown in any one of FIGS. 1T-1U, wherein X, Y, Z, A, B, and C are ABMs directed to CD2, a component of a TCR complex, and TAA as shown in Table 6.

TABLE 6
ABM Permutations in Hexavalent TBMs

| Hexa- | | | | | | |
|---|---|---|---|---|---|---|
| valent | | | | | | |
| Config- | | | | | | |
| uration | X | Y | Z | A | B | C |
| Hv 1 | CD2 | CD2 | TCR | TCR | TAA | TAA |
| Hv 2 | CD2 | CD2 | TCR | TAA | TCR | TAA |
| Hv 3 | CD2 | CD2 | TCR | TAA | TAA | TCR |
| Hv 4 | CD2 | CD2 | TAA | TCR | TCR | TAA |
| Hv 5 | CD2 | CD2 | TAA | TCR | TAA | TCR |
| Hv 6 | CD2 | CD2 | TAA | TAA | TCR | TCR |
| Hv 7 | CD2 | TCR | CD2 | TCR | TAA | TAA |
| Hv 8 | CD2 | TCR | CD2 | TAA | TCR | TAA |
| Hv 9 | CD2 | TCR | CD2 | TAA | TAA | TCR |
| Hv 10 | CD2 | TAA | CD2 | TCR | TCR | TAA |
| Hv 11 | CD2 | TAA | CD2 | TCR | TAA | TCR |
| Hv 12 | CD2 | TAA | CD2 | TAA | TCR | TCR |
| Hv 13 | CD2 | TCR | TCR | CD2 | TAA | TAA |
| Hv 14 | CD2 | TCR | TAA | CD2 | TCR | TAA |
| Hv 15 | CD2 | TCR | TAA | CD2 | TAA | TCR |
| Hv 16 | CD2 | TAA | TCR | CD2 | TCR | TAA |
| Hv 17 | CD2 | TAA | TCR | CD2 | TAA | TCR |
| Hv 18 | CD2 | TAA | TAA | CD2 | TCR | TCR |
| Hv 19 | CD2 | TCR | TCR | TAA | CD2 | TAA |
| Hv 20 | CD2 | TCR | TAA | TCR | CD2 | TAA |
| Hv 21 | CD2 | TCR | TAA | TAA | CD2 | TCR |
| Hv 22 | CD2 | TAA | TCR | TCR | CD2 | TAA |
| Hv 23 | CD2 | TAA | TCR | TAA | CD2 | TCR |
| Hv 24 | CD2 | TAA | TAA | TCR | CD2 | TCR |
| Hv 25 | CD2 | TCR | TCR | TAA | TAA | CD2 |
| Hv 26 | CD2 | TCR | TAA | TCR | TAA | CD2 |
| Hv 27 | CD2 | TCR | TAA | TAA | TCR | CD2 |
| Hv 28 | CD2 | TAA | TCR | TCR | TAA | CD2 |
| Hv 29 | CD2 | TAA | TCR | TAA | TCR | CD2 |
| Hv 30 | CD2 | TAA | TAA | TCR | TCR | CD2 |
| Hv 31 | TCR | CD2 | CD2 | TCR | TAA | TAA |
| Hv 32 | TCR | CD2 | CD2 | TAA | TCR | TAA |
| Hv 33 | TCR | CD2 | CD2 | TAA | TAA | TCR |
| Hv 34 | TAA | CD2 | CD2 | TCR | TCR | TAA |
| Hv 35 | TAA | CD2 | CD2 | TCR | TAA | TCR |
| Hv 36 | TAA | CD2 | CD2 | TAA | TCR | TCR |
| Hv 37 | TCR | CD2 | TCR | CD2 | TAA | TAA |
| Hv 38 | TCR | CD2 | TAA | CD2 | TCR | TAA |
| Hv 39 | TCR | CD2 | TAA | CD2 | TAA | TCR |
| Hv 40 | TAA | CD2 | TCR | CD2 | TCR | TAA |
| Hv 41 | TAA | CD2 | TCR | CD2 | TAA | TCR |
| Hv 42 | TAA | CD2 | TAA | CD2 | TCR | TCR |
| Hv 43 | TCR | CD2 | TCR | TAA | CD2 | TAA |
| Hv 44 | TCR | CD2 | TAA | TCR | CD2 | TAA |
| Hv 45 | TCR | CD2 | TAA | TAA | CD2 | TCR |
| Hv 46 | TAA | CD2 | TCR | TCR | CD2 | TAA |
| Hv 47 | TAA | CD2 | TCR | TAA | CD2 | TCR |
| Hv 48 | TAA | CD2 | TAA | TCR | CD2 | TCR |
| Hv 49 | TCR | CD2 | TCR | TAA | TAA | CD2 |
| Hv 50 | TCR | CD2 | TAA | TCR | TAA | CD2 |
| Hv 51 | TCR | CD2 | TAA | TAA | TCR | CD2 |
| Hv 52 | TAA | CD2 | TCR | TCR | TAA | CD2 |
| Hv 53 | TAA | CD2 | TCR | TAA | TCR | CD2 |
| Hv 54 | TAA | CD2 | TAA | TCR | TCR | CD2 |
| Hv 55 | TCR | TCR | CD2 | CD2 | TAA | TAA |
| Hv 56 | TCR | TAA | CD2 | CD2 | TCR | TAA |
| Hv 57 | TCR | TAA | CD2 | CD2 | TAA | TCR |
| Hv 58 | TAA | TCR | CD2 | CD2 | TCR | TAA |
| Hv 59 | TAA | TCR | CD2 | CD2 | TAA | TCR |
| Hv 60 | TAA | TAA | CD2 | CD2 | TCR | TCR |
| Hv 61 | TCR | TCR | CD2 | TAA | CD2 | TAA |
| Hv 62 | TCR | TAA | CD2 | TCR | CD2 | TAA |
| Hv 63 | TCR | TAA | CD2 | TAA | CD2 | TCR |
| Hv 64 | TAA | TCR | CD2 | TCR | CD2 | TAA |
| Hv 65 | TAA | TCR | CD2 | TAA | CD2 | TCR |
| Hv 66 | TAA | TAA | CD2 | TCR | CD2 | TCR |
| Hv 67 | TCR | TCR | CD2 | TAA | TAA | CD2 |
| Hv 68 | TCR | TAA | CD2 | TCR | TAA | CD2 |
| Hv 69 | TCR | TAA | CD2 | TAA | TCR | CD2 |
| Hv 70 | TAA | TCR | CD2 | TCR | TAA | CD2 |
| Hv 71 | TAA | TCR | CD2 | TAA | TCR | CD2 |
| Hv 72 | TAA | TAA | CD2 | TCR | TCR | CD2 |
| Hv 73 | TCR | TCR | TAA | CD2 | CD2 | TAA |
| Hv 74 | TCR | TAA | TCR | CD2 | CD2 | TAA |
| Hv 75 | TCR | TAA | TAA | CD2 | CD2 | TCR |
| Hv 76 | TAA | TCR | TCR | CD2 | CD2 | TAA |
| Hv 77 | TAA | TCR | TAA | CD2 | CD2 | TCR |
| Hv 78 | TAA | TAA | TCR | CD2 | CD2 | TCR |
| Hv 79 | TCR | TCR | TAA | CD2 | TAA | CD2 |
| Hv 80 | TCR | TAA | TCR | CD2 | TAA | CD2 |
| Hv 81 | TCR | TAA | TAA | CD2 | TCR | CD2 |
| Hv 82 | TAA | TCR | TCR | CD2 | TAA | CD2 |
| Hv 83 | TAA | TCR | TAA | CD2 | TCR | CD2 |
| Hv 84 | TAA | TAA | TCR | CD2 | TCR | CD2 |
| Hv 85 | TCR | TCR | TAA | TAA | CD2 | CD2 |
| Hv 86 | TCR | TAA | TCR | TAA | CD2 | CD2 |
| Hv 87 | TCR | TAA | TAA | TCR | CD2 | CD2 |
| Hv 88 | TAA | TCR | TCR | TAA | CD2 | CD2 |
| Hv 89 | TAA | TCR | TAA | TCR | CD2 | CD2 |
| Hv 90 | TAA | TAA | TCR | TCR | CD2 | CD2 |
| Hv 91 | CD2 | TCR | TCR | TAA | TAA | TAA |
| Hv 92 | CD2 | TCR | TAA | TCR | TAA | TAA |
| Hv 93 | CD2 | TCR | TAA | TAA | TCR | TAA |
| Hv 94 | CD2 | TCR | TAA | TAA | TAA | TCR |
| Hv 95 | CD2 | TAA | TCR | TCR | TAA | TAA |
| Hv 96 | CD2 | TAA | TCR | TAA | TCR | TAA |
| Hv 97 | CD2 | TAA | TCR | TAA | TAA | TCR |
| Hv 98 | CD2 | TAA | TAA | TCR | TCR | TAA |
| Hv 99 | CD2 | TAA | TAA | TCR | TAA | TCR |
| Hv 100 | CD2 | TAA | TAA | TAA | TCR | TCR |
| Hv 101 | TCR | CD2 | TCR | TAA | TAA | TAA |
| Hv 102 | TCR | CD2 | TAA | TCR | TAA | TAA |
| Hv 103 | TCR | CD2 | TAA | TAA | TCR | TAA |
| Hv 104 | TCR | CD2 | TAA | TAA | TAA | TCR |
| Hv 105 | TAA | CD2 | TCR | TCR | TAA | TAA |
| Hv 106 | TAA | CD2 | TCR | TAA | TCR | TAA |
| Hv 107 | TAA | CD2 | TCR | TAA | TAA | TCR |
| Hv 108 | TAA | CD2 | TAA | TCR | TCR | TAA |
| Hv 109 | TAA | CD2 | TAA | TCR | TAA | TCR |
| Hv 110 | TAA | CD2 | TAA | TAA | TCR | TCR |
| Hv 111 | TCR | TCR | CD2 | TAA | TAA | TAA |
| Hv 112 | TCR | TAA | CD2 | TCR | TAA | TAA |
| Hv 113 | TCR | TAA | CD2 | TAA | TCR | TAA |
| Hv 114 | TCR | TAA | CD2 | TAA | TAA | TCR |
| Hv 115 | TAA | TCR | CD2 | TCR | TAA | TAA |
| Hv 116 | TAA | TCR | CD2 | TAA | TCR | TAA |
| Hv 117 | TAA | TCR | CD2 | TAA | TAA | TCR |
| Hv 118 | TAA | TAA | CD2 | TCR | TCR | TAA |
| Hv 119 | TAA | TAA | CD2 | TCR | TAA | TCR |
| Hv 120 | TAA | TAA | CD2 | TAA | TCR | TCR |
| Hv 121 | TCR | TCR | TAA | CD2 | TAA | TAA |
| Hv 122 | TCR | TAA | TCR | CD2 | TAA | TAA |
| Hv 123 | TCR | TAA | TAA | CD2 | TCR | TAA |
| Hv 124 | TCR | TAA | TAA | CD2 | TAA | TCR |
| Hv 125 | TAA | TCR | TCR | CD2 | TAA | TAA |
| Hv 126 | TAA | TCR | TAA | CD2 | TCR | TAA |
| Hv 127 | TAA | TCR | TAA | CD2 | TAA | TCR |
| Hv 128 | TAA | TAA | TCR | CD2 | TCR | TAA |
| Hv 129 | TAA | TAA | TCR | CD2 | TAA | TCR |
| Hv 130 | TAA | TAA | TAA | CD2 | TCR | TCR |
| Hv 131 | TCR | TCR | TAA | TAA | CD2 | TAA |
| Hv 132 | TCR | TAA | TCR | TAA | CD2 | TAA |
| Hv 133 | TCR | TAA | TAA | TCR | CD2 | TAA |
| Hv 134 | TCR | TAA | TAA | TAA | CD2 | TCR |
| Hv 135 | TAA | TCR | TCR | TAA | CD2 | TAA |
| Hv 136 | TAA | TCR | TAA | TCR | CD2 | TAA |
| Hv 137 | TAA | TCR | TAA | TAA | CD2 | TCR |
| Hv 138 | TAA | TAA | TCR | TCR | CD2 | TAA |
| Hv 139 | TAA | TAA | TCR | TAA | CD2 | TCR |
| Hv 140 | TAA | TAA | TAA | TCR | CD2 | TCR |
| Hv 141 | TCR | TCR | TAA | TAA | TAA | CD2 |
| Hv 142 | TCR | TAA | TCR | TAA | TAA | CD2 |
| Hv 143 | TCR | TAA | TAA | TCR | TAA | CD2 |
| Hv 144 | TCR | TAA | TAA | TAA | TCR | CD2 |
| Hv 145 | TAA | TCR | TCR | TAA | TAA | CD2 |
| Hv 146 | TAA | TCR | TAA | TCR | TAA | CD2 |
| Hv 147 | TAA | TCR | TAA | TAA | TCR | CD2 |
| Hv 148 | TAA | TAA | TCR | TCR | TAA | CD2 |
| Hv 149 | TAA | TAA | TCR | TAA | TCR | CD2 |
| Hv 150 | TAA | TAA | TAA | TCR | TCR | CD2 |
| Hv 151 | CD2 | CD2 | TCR | TAA | TAA | TAA |
| Hv 152 | CD2 | CD2 | TAA | TCR | TAA | TAA |
| Hv 153 | CD2 | CD2 | TAA | TAA | TCR | TAA |
| Hv 154 | CD2 | CD2 | TAA | TAA | TAA | TCR |
| Hv 155 | CD2 | TCR | CD2 | TAA | TAA | TAA |
| Hv 156 | CD2 | TAA | CD2 | TCR | TAA | TAA |
| Hv 157 | CD2 | TAA | CD2 | TAA | TCR | TAA |
| Hv 158 | CD2 | TAA | CD2 | TAA | TAA | TCR |
| Hv 159 | CD2 | TCR | TAA | CD2 | TAA | TAA |
| Hv 160 | CD2 | TAA | TCR | CD2 | TAA | TAA |
| Hv 161 | CD2 | TAA | TAA | CD2 | TCR | TAA |
| Hv 162 | CD2 | TAA | TAA | CD2 | TAA | TCR |
| Hv 163 | CD2 | TCR | TAA | TAA | CD2 | TAA |
| Hv 164 | CD2 | TAA | TCR | TAA | CD2 | TAA |
| Hv 165 | CD2 | TAA | TAA | TCR | CD2 | TAA |
| Hv 166 | CD2 | TAA | TAA | TAA | CD2 | TCR |
| Hv 167 | CD2 | TCR | TAA | TAA | TAA | CD2 |
| Hv 168 | CD2 | TAA | TCR | TAA | TAA | CD2 |
| Hv 169 | CD2 | TAA | TAA | TCR | TAA | CD2 |
| Hv 170 | CD2 | TAA | TAA | TAA | TCR | CD2 |
| Hv 171 | TCR | CD2 | CD2 | TAA | TAA | TAA |
| Hv 172 | TAA | CD2 | CD2 | TCR | TAA | TAA |
| Hv 173 | TAA | CD2 | CD2 | TAA | TCR | TAA |
| Hv 174 | TAA | CD2 | CD2 | TAA | TAA | TCR |
| Hv 175 | TCR | CD2 | TAA | CD2 | TAA | TAA |
| Hv 176 | TAA | CD2 | TCR | CD2 | TAA | TAA |
| Hv 177 | TAA | CD2 | TAA | CD2 | TCR | TAA |
| Hv 178 | TAA | CD2 | TAA | CD2 | TAA | TCR |
| Hv 179 | TCR | CD2 | TAA | TAA | CD2 | TAA |
| Hv 180 | TAA | CD2 | TCR | TAA | CD2 | TAA |
| Hv 181 | TAA | CD2 | TAA | TCR | CD2 | TAA |
| Hv 182 | TAA | CD2 | TAA | TAA | CD2 | TCR |
| Hv 183 | TCR | CD2 | TAA | TAA | TAA | CD2 |
| Hv 184 | TAA | CD2 | TCR | TAA | TAA | CD2 |
| Hv 185 | TAA | CD2 | TAA | TCR | TAA | CD2 |
| Hv 186 | TAA | CD2 | TAA | TAA | TCR | CD2 |
| Hv 187 | TCR | TAA | CD2 | CD2 | TAA | TAA |
| Hv 188 | TAA | TCR | CD2 | CD2 | TAA | TAA |
| Hv 189 | TAA | TAA | CD2 | CD2 | TCR | TAA |
| Hv 190 | TAA | TAA | CD2 | CD2 | TAA | TCR |
| Hv 191 | TCR | TAA | CD2 | TAA | CD2 | TAA |
| Hv 192 | TAA | TCR | CD2 | TAA | CD2 | TAA |
| Hv 193 | TAA | TAA | CD2 | TCR | CD2 | TAA |
| Hv 194 | TAA | TAA | CD2 | TAA | CD2 | TCR |
| Hv 195 | TCR | TAA | CD2 | TAA | TAA | CD2 |
| Hv 196 | TAA | TCR | CD2 | TAA | TAA | CD2 |
| Hv 197 | TAA | TAA | CD2 | TCR | TAA | CD2 |
| Hv 198 | TAA | TAA | CD2 | TAA | TCR | CD2 |
| Hv 199 | TCR | TAA | TAA | CD2 | CD2 | TAA |
| Hv 200 | TAA | TCR | TAA | CD2 | CD2 | TAA |
| Hv 201 | TAA | TAA | TCR | CD2 | CD2 | TAA |
| Hv 202 | TAA | TAA | TAA | CD2 | CD2 | TCR |
| Hv 203 | TCR | TAA | TAA | CD2 | TAA | CD2 |
| Hv 204 | TAA | TCR | TAA | CD2 | TAA | CD2 |
| Hv 205 | TAA | TAA | TCR | CD2 | TAA | CD2 |
| Hv 206 | TAA | TAA | TAA | CD2 | TCR | CD2 |
| Hv 207 | TCR | TAA | TAA | TAA | CD2 | CD2 |
| Hv 208 | TAA | TCR | TAA | TAA | CD2 | CD2 |
| Hv 209 | TAA | TAA | TCR | TAA | CD2 | CD2 |
| Hv 210 | TAA | TAA | TAA | TCR | CD2 | CD2 |
| Hv 211 | CD2 | TCR | TAA | TAA | TAA | TAA |
| Hv 212 | CD2 | TAA | TCR | TAA | TAA | TAA |
| Hv 213 | CD2 | TAA | TAA | TCR | TAA | TAA |
| Hv 214 | CD2 | TAA | TAA | TAA | TCR | TAA |
| Hv 215 | CD2 | TAA | TAA | TAA | TAA | TCR |
| Hv 216 | TCR | CD2 | TAA | TAA | TAA | TAA |
| Hv 217 | TAA | CD2 | TCR | TAA | TAA | TAA |
| Hv 218 | TAA | CD2 | TAA | TCR | TAA | TAA |
| Hv 219 | TAA | CD2 | TAA | TAA | TCR | TAA |
| Hv 220 | TAA | CD2 | TAA | TAA | TAA | TCR |
| Hv 221 | TCR | TAA | CD2 | TAA | TAA | TAA |
| Hv 222 | TAA | TCR | CD2 | TAA | TAA | TAA |
| Hv 223 | TAA | TAA | CD2 | TCR | TAA | TAA |
| Hv 224 | TAA | TAA | CD2 | TAA | TCR | TAA |
| Hv 225 | TAA | TAA | CD2 | TAA | TAA | TCR |
| Hv 226 | TCR | TAA | TAA | CD2 | TAA | TAA |
| Hv 227 | TAA | TCR | TAA | CD2 | TAA | TAA |
| Hv 228 | TAA | TAA | TCR | CD2 | TAA | TAA |
| Hv 229 | TAA | TAA | TAA | CD2 | TCR | TAA |
| Hv 230 | TAA | TAA | TAA | CD2 | TAA | TCR |
| Hv 231 | TCR | TAA | TAA | TAA | CD2 | TAA |
| Hv 232 | TAA | TCR | TAA | TAA | CD2 | TAA |
| Hv 233 | TAA | TAA | TCR | TAA | CD2 | TAA |
| Hv 234 | TAA | TAA | TAA | TCR | CD2 | TAA |
| Hv 235 | TAA | TAA | TAA | TAA | CD2 | TCR |
| Hv 236 | TCR | TAA | TAA | TAA | TAA | CD2 |
| Hv 237 | TAA | TCR | TAA | TAA | TAA | CD2 |
| Hv 238 | TAA | TAA | TCR | TAA | TAA | CD2 |
| Hv 239 | TAA | TAA | TAA | TCR | TAA | CD2 |
| Hv 240 | TAA | TAA | TAA | TAA | TCR | CD2 |

### 6.5. TCR ABMs

[0368] The TBMs of the disclosure contain an ABM that specifically binds to a component of a TCR complex. The TCR is a disulfide-linked membrane-anchored heterodimeric protein normally consisting of the highly variable alpha (α) and beta (β) chains expressed as part of a complex with the invariant CD3 chain molecules. T cells expressing this receptor are referred to as α:β (or ββ) T cells, though a minority of T cells express an alternate receptor, formed by variable gamma (γ) and delta (δ) chains, referred as γδ T cells.

[0369] In a preferred embodiment, TBMs of the disclosure contain an ABM that specifically binds to CD3.

[0370] 6.5.1. CD3 ABMs

[0371] The TBMs of the disclosure can contain an ABM that specifically binds to CD3. The term “CD3” refers to the cluster of differentiation 3 co-receptor (or co-receptor complex, or polypeptide chain of the co-receptor complex) of the T cell receptor. The amino acid sequence of the polypeptide chains of human CD3 are provided in NCBI Accession P04234, P07766 and P09693. CD3 proteins may also include variants. CD3 proteins may also include fragments. CD3 proteins also include post-translational modifications of the CD3 amino acid sequences. Post-translational modifications include, but are not limited to, N- and O-linked glycosylation.

[0372] In some embodiments, a TBM of the disclosure can comprise an ABM which is an anti-CD3 antibody (e.g., as described in US 2016/0355600, WO 2014/110601, and WO 2014/145806, the contents of which are hereby incorporated by reference) or an antigen-binding domain thereof. Exemplary anti-CD3 VH, VL, and scFV sequences that can be used in TBM of the disclosure are provided in Table 7A.

TABLE 7A
CD3 Binders-Variable domain sequences

| | | | SEQ |
|---|---|---|---|
| Binding | | | ID |
| Domain | Chain | Sequence | NO: |
| CD3-1 | VH | QVQLQQSGAELARPGASVKMSCKASGYTFTRYTMHWVKQRPGQG | 79 |
| | | LEWIGYINPSRGYTNYNQKFKDKATLTTDKSSSTAYMQLSSLTSEDS | |
| | | AVYYCARYYDDHYCLDYWGQGTTLTVSS | |
| | VL | QIVLTQSPAIMSASPGEKVTMTCSASSSVSYMNWYQQKSGTSPKR | 80 |
| | | WIYDTSKLASGVPAHFRGSGSGTSYSLTISGMEAEDAATYYCQQWS | |
| | | SNPFTFGSGTKLEIN | |
| CD3-2 | VH | EVQLVESGGGLVQPKGSLKLSCAASGFTFNTYAMNWVRQAPGKGL | 81 |
| | | EWVARIRSKYNNYATYYADSVKDRFTISRDDSQSILYLQMNNLKTED | |
| | | TAMYYCVRHGNFGNSYVSWFAYWGQGTLVTVSA | |
| | VL | QAVVTQESALTTSPGETVTLTCRSSTGAVTTSNYANWVQEKPDHLF | 82 |
| | | TGLIGGTNKRAPGVPARFSGSLIGDKAALTITGAQTEDEAIYFCALWY | |
| | | SNLWVFGGGTKLTVL | |
| CD3-3 | VH | QVQLQQSGAELARPGASVKMSCKASGYTFTSYTMHWVKQRPGQG | 83 |
| | | LEWIGYINPSSGYTKYNQKFKDKATLTADKSSSTAYMQLSSLTSEDS | |
| | | AVYYCARWQDYDVYFDYWGQGTTLTVSS | |
| | VL | QIVLSQSPAILSASPGEKVTMTCRASSSVSYMHWYQQKPGSSPKPW | 84 |
| | | IYATSNLASGVPARFSGSGSGTSYSLTISRVEAEDAATYYCQQWSSN | |
| | | PPTFGGGTKLETK | |
| CD3-4 | VH | QVQLQQSGAELARPGASVKMSCKASGYTFTRYTMHWVKQRPGQG | 79 |
| | | LEWIGYINPSRGYTNYNQKFKDKATLTTDKSSSTAYMQLSSLTSEDS | |
| | | AVYYCARYYDDHYCLDYWGQGTTLTVSS | |
| | VL | QIVLTQSPAIMSASPGEKVTMTCRASSSVSYMNWYQQKSGTSPKR | 85 |
| | | WIYDTSKVASGVPYRFSGSGSGTSYSLTISSMEAEDAATYYCQQWS | |
| | | SNPLTFGSGTKLEIN | |
| CD3-5 | VH | QVQLVQSGGGVVQPGRSLRLSCKASGYTFTRYTMHWVRQAPGKG | 86 |
| | | LEWIGYINPSRGYTNYNQKVKDRFTISRDNSKNTAFLQMDSLRPEDT | |
| | | GVYFCARYYDDHYCLDYWGQGTPVTVSS | |
| | VL | DIQMTQSPSSLSASVGDRVTITCSASSSVSYMNWYQQTPGKAPKR | 87 |
| | | WIYDTSKLASGVPSRFSGSGSGTDYTFTISSLQPEDIATYYCQQWSS | |
| | | NPFTFGQGTKLQIT | |
| CD3-6 | VH | QVQLVESGGGVVQPGRSLRLSCAASGFKFSGYGMHWVRQAPGKG | 88 |
| | | LEWVAVIWYDGSKKYYVDSVKGRFTISRDNSKNTLYLQMNSLRAED | |
| | | TAVYYCARQMGYWHFDLWGRGTLVTVSS | |
| | VL | EIVLTQSPATLSLSPGERATLSCRASQSVSSYLAWYQQKPGQAPRLL | 89 |
| | | IYDASNRATGIPARFSGSGSGTDFTLTISSLEPEDFAVYYCQQRSNW | |
| | | PPLTFGGGTKVEIK | |
| CD3-7 | VH | EVQLVESGGGLVQPGGSLRLSCAASGFTFSTYAMNWVRQAPGKGL | 90 |
| | | EWVGRIRSKYNNYATYYADSVKDRFISRDDSKNSLYLQMNSLKTED | |
| | | TAVYYCVRHGNFGNSYVSWFAYWGQGTLVTVSS | |
| | VL | QAVVTQEPSLTVSPGGTVTLTCRSSTGAVTTSNYANWVQQKPGQA | 91 |
| | | PRGLIGGTNKRAPWTPARFSGSLLGGKAALIGAQAEDEADYYCALW | |
| | | YSNLWVFGGGTKLTVL | |
| CD3-8 | VH | DIKLQQSGAELARPGASVKMSCKTSGYTFTRYTMHWVKQRPGQGL | 92 |
| | | EWIGYINPSRGYTNYNQKFKDKATLTTDKSSSTAYMQLSSLTSEDSA | |
| | | VYYCARYYDDHYCLDYWGQGTTLTVSS | |
| | VL | DIQLTQSPAIMSASPGEKVTMTCRASSSVSYMNWYQQKSGTSPKR | 93 |
| | | WIYDTSKVASGVPYRFSGSGSGTSYSLISSMEAEDAATYYCQQWSS | |
| | | NPLTFGAGTKLELK | |
| CD3-9 | VH | EVQLVESGGGLVQPGGSLRLSCAASGFTFNTYAMNWVRQAPGKGL | 94 |
| | | EWVARIRSKYNNYATYYADSVKDRFISRDDSKNSLYLQMNSLKTEDT | |
| | | AVYYCVRHGNFGNSYVSWFAYWGQGTLVTVSS | |
| | VL | QAVVTQEPSLTVSPGGTVTLTCRSSTGAVTTSNYANWVQQKPGQA | 91 |
| | | PRGLIGGTNKRAPWTPARFSGSLLGGKAALIGAQAEDEADYYCALW | |
| | | YSNLWVFGGGTKLTVL | |
| CD3-10 | VH | EVKLLESGGGLVQPKGSLKLSCAASGFTFNTYAMNWVRQAPGKGL | 95 |
| | | EWVARIRSKYNNYATYYADSVKDRFTISRDDSQSILYLQMNNLKTED | |
| | | TAMYYCVRHGNFGNSYVSWFAYWGQGTLVTVSA | |
| | VL | QAVVTQESALTTSPGETVTLTCRSSTGAVTTSNYANWVQEKPDHLF | 82 |
| | | TGLIGGTNKRAPGVPARFSGSLIGDKAALTITGAQTEDEAIYFCALWY | |
| | | SNLWVFGGGTKLTVL | |
| CD3-11 | VH | EVQLVESGGGLVQPGGSLKLSCAASGFTFNSYAMNWVRQAPGKGL | 96 |
| | | EWVARIRSKYNNYATYYADSVKGRFTISRDDSKNTAYLQMNNLKTE | |
| | | DTAVYYCVRHGNFGNSYVSWWAYWGQGTLVTVSS | |
| | VL | QTVVTQEPSLTVSPGGTVTLTCGSSTGAVTSGNYPNWVQQKPGQA | 97 |
| | | PRGLIGGTKFLAPGTPQRFSGSLLGGKAALTLSGVQPEDEAEYYCVL | |
| | | WYSNRWVFGGGTKLTVL | |
| CD3-12 | VH | EVQLVESGGGLVQPGGSLKLSCAASGFTFNKYAMNWVRQAPGKGL | 98 |
| | | EWVARIRSKYNNYATYYADSVKDRFTISRDDSKNTAYLQMNNLKTE | |
| | | DTAVYYCVRHGNFGNSYISYWAYWGQGTLVTVSS | |
| | VL | QTVVTQEPSLTVSPGGTVTLTCGSSTGAVTSGNYPNWVQQKPGQA | 99 |
| | | PRGLIGGTKFLAPGTPARFSGSLLGGKAALTLSGVQPEDEAEYYCVL | |
| | | WYSNRWVFGGGTKLTVL | |
| CD3-13 | VH | QVQLVQSGAEVKKPGASVKVSCKASGYTFTRYTMHWVRQAPGQGL | 100 |
| | | EWMGYINPSRGYTNYNQKFKDRVTMTTDTSISTAYMELSRLRSDDT | |
| | | AVYYCARYYDDHYCLDYWGQGTLVTVSS | |
| | VL | EIVLTQSPATLSLSPGERATLSCSASSSVSYMNWYQQKPGQAPRLLI | 101 |
| | | YDTSKLASGVPAHFRGSGSGTDFTLTISSLEPEDFAVYYCQQWSSN | |
| | | PFTFGQGTKVEIK | |
| CD3-14 | VH | EVQLVESGGGLVQPGGSLRLSCAASGFTFSTYAMNWVRQAPGKGL | 102 |
| | | EWVSRIRSKYNNYATYYADSVKDRFTISRDDSKNTLYLQMNSLRAED | |
| | | TAVYYCARHGNFGNSYVSWFAYWGQGTMVTVSS | |
| | VL | QAVVTQEPSLTVSPGGTVTLTCRSSTGAVTTSNYANWVQQKPGQA | 103 |
| | | PRGLIGGTNKRAPGTPARFSGSLLGGKAALTLSGVQPEDEAEYYCA | |
| | | LWYSNLWVFGGGTKLTVL | |
| CD3-15 | VH | EVQLVESGGGLVQPGGSLRLSCAASGFTFNTYAMNWVRQAPGKGL | 104 |
| | | EWVGRIRSKYNNYATYYADSVKDRFTISRDDSKNSLYLQMNSLKTE | |
| | | DTAVYYCVRHGNFGNSYVSWFAYWGQGTLVTVSS | |
| | VL | QAVVTQEPSLTVSPGGTVTLTCRSSTGAVTTSNYANWVQEKPGQA | 105 |
| | | PRGLIGGTNKRAPWTPARFSGSLLGGKAALTITGAQAEDEADYYCAL | |
| | | WYSNLWVFGGGTKLTVL | |
| CD3-16 | VH | EVQLVESGGGLVQPGGSLRLSCAASGFTFNTYAMNWVRQAPGKGL | 106 |
| | | EWVGRIRSKYNNYATYYADSVKGRFTISRDDSKNTLYLQMNSLRAE | |
| | | DTAVYYCVRHGNFGNSYVSWFAYWGQGTLVTVSS | |
| | VL | QAVVTQEPSLTVSPGGTVTLTCGSSTGAVTTSNYANWVQQKPGQA | 107 |
| | | PRGLIGGTNKRAPGVPARFSGSLLGGKAALTLSGAQPEDEAEYYCA | |
| | | LWYSNLWVFGGGTKLTVL | |
| CD3-17 | VH | EVQLVESGGGLVQPGGSLRLSCAASGFTFSTYAMNWVRQAPGKGL | 108 |
| | | EWVGRIRSKYNNYATYYADSVKGRFTISRDDSKNTLYLQMNSLRAE | |
| | | DTAVYYCVRHGNFGDSYVSWFAYWGQGTLVTVSS | |
| | VL | QAVVTQEPSLTVSPGGTVTLTCGSSTGAVTTSNYANWVQQKPGKS | 109 |
| | | PRGLIGGTNKRAPGVPARFSGSLLGGKAALTISGAQPEDEADYYCAL | |
| | | WYSNHWVFGGGTKLTVL | |
| CD3-18 | VH | QVQLVQSGGGVVQPGRSLRLSCKASGYTFTRYTMHWVRQAPGKG | 86 |
| | | LEWIGYINPSRGYTNYNQKVKDRFTISRDNSKNTAFLQMDSLRPEDT | |
| | | GVYFCARYYDDHYCLDYWGQGTPVTVSS | |
| | VL | DIQMTQSPSSLSASVGDRVTITCSASSSVSYMNWYQQTPGKAPKR | 110 |
| | | WIYDTSKLASGVPSRFSGSGSGTDYTFTISSLQPEDIATYYCQQWSS | |
| | | NPFTFGQGT | |
| CD3-19 | VH | QVQLVQSGGGVVQPGRSLRLSCKASGYTFTRYTMHWVRQAPGKG | 111 |
| | | LEWIGYINPSRGYTNYNQKVKDRFTISRDNSKNTAFLQMDSLRPEDT | |
| | | GVYFCARYYDDHYSLDYWGQGTPVTVSS | |
| | VL | DIQMTQSPSSLSASVGDRVTITCSASSSVSYMNWYQQTPGKAPKR | 110 |
| | | WIYDTSKLASGVPSRFSGSGSGTDYTFTISSLQPEDIATYYCQQWSS | |
| | | NPFTFGQGT | |
| CD3-20 | VH | EVQLQQSGPELVKPGASMKISCKASGYSFTGYTMNWVKQSHGKNL | 112 |
| | | EWMGLINPYKGVSTYNQKFKDKATLTVDKSSSTAYMELLSLTSEDSA | |
| | | VYYCARSGYYGDSDWYFDVWGQGTTLTVFS | |
| | VL | DIQMTQTTSSLSASLGDRVTISCRASQDIRNYLNWYQQKPDGTVKLL | 113 |
| | | IYYTSRLHSGVPSKFSGSGSGTDYSLTISNLEQEDIATYFCQQGNTLP | |
| | | WTFAGGTKLEIK | |
| CD3-21 | VH | EVQLVESGGGLVQPGGSLKLSCAASGFTFNTYAMNWVRQASGKGL | 114 |
| | | EWVGRIRSKYNNYATYYADSVKDRFTISRDDSKSTLYLQMNSLKTED | |
| | | TAVYYCVRHGNFGNSYVSWFAYWGQGTLVTVSS | |
| | VL | QAVVTQEPSLTVSPGGTVTLTCRSSTGAVTTSNYANWVQQKPGQA | 115 |
| | | PRGLIGGTNKRAPWTPARFSGSLLGDKAALTLSGAQPEDEAEYFCA | |
| | | LWYSNLWVFGGGTKLTVL | |
| | scFv | EVQLVESGGGLVQPGGSLKLSCAASGFTFNTYAMNWVRQASGKGL | 116 |
| | | EWVGRIRSKYNNYATYYADSVKDRFTISRDDSKSTLYLQMNSLKTED | |
| | | TAVYYCVRHGNFGNSYVSWFAYWGQGTLVTVSSGGGGSGGGGSG | |
| | | GGGSGGGGSQAVVTQEPSLTVSPGGTVTLTCRSSTGAVTTSNYAN | |
| | | WVQQKPGQAPRGLIGGTNKRAPWTPARFSGSLLGDKAALTLSGAQ | |
| | | PEDEAEYFCALWYSNLWVFGGGTKLTVL | |
| CD3-22 | VH | EVQLVESGGGLVQPGGSLRLSCAASGFTFSTYAMNWVRQAPGKGL | 108 |
| | | EWVGRIRSKYNNYATYYADSVKGRFTISRDDSKNTLYLQMNSLRAE | |
| | | DTAVYYCVRHGNFGDSYVSWFAYWGQGTLVTVSS | |
| | VL | QAVVTQEPSLTVSPGGTVTLTCGSSTGAVTTSNYANWVQQKPGKS | 109 |
| | | PRGLIGGTNKRAPGVPARFSGSLLGGKAALTISGAQPEDEADYYCAL | |
| | | WYSNHWVFGGGTKLTVL | |
| | scFv | EVQLVESGGGLVQPGGSLRLSCAASGFTFSTYAMNWVRQAPGKGL | 117 |
| | | EWVGRIRSKYNNYATYYADSVKGRFTISRDDSKNTLYLQMNSLRAE | |
| | | DTAVYYCVRHGNFGDSYVSWFAYWGQGTLVTVSSGKPGSGKPGS | |
| | | GKPGSGKPGSQAVVTQEPSLTVSPGGTVTLTCGSSTGAVTTSNYAN | |
| | | WVQQKPGKSPRGLIGGTNKRAPGVPARFSGSLLGGKAALTISGAQP | |
| | | EDEADYYCALWYSNHWVFGGGTKLTVL | |
| CD3-23 | VH | EVQLVESGGGLVQPGGSLRLSCAASGFTFSTYAMNWVRQAPGKGL | 118 |
| | | EWVGRIRSKANNYATYYADSVKGRFTISRDDSKNTLYLQMNSLRAE | |
| | | DTAVYYCVRHGNFGDSYVSWFAYWGQGTLVTVSS | |
| | VL | QAVVTQEPSLTVSPGGTVTLTCGSSTGAVTTSNYANWVQQKPGKS | 109 |
| | | PRGLIGGTNKRAPGVPARFSGSLLGGKAALTISGAQPEDEADYYCAL | |
| | | WYSNHWVFGGGTKLTVL | |
| | scFv | EVQLVESGGGLVQPGGSLRLSCAASGFTFSTYAMNWVRQAPGKGL | 119 |
| | | EWVGRIRSKANNYATYYADSVKGRFTISRDDSKNTLYLQMNSLRAE | |
| | | DTAVYYCVRHGNFGDSYVSWFAYWGQGTLVTVSSGKPGSGKPGS | |
| | | GKPGSGKPGSQAVVTQEPSLTVSPGGTVTLTCGSSTGAVTTSNYAN | |
| | | WVQQKPGKSPRGLIGGTNKRAPGVPARFSGSLLGGKAALTISGAQP | |
| | | EDEADYYCALWYSNHWVFGGGTKLTVL | |
| CD3-24 | VH | EVQLVESGGGLVQPGGSLRLSCAASGFTFSTYAMNWVRQAPGKGL | 120 |
| | | EWVGRIRSKYNNYATYYADSVKGRFTISRDDSKNTLYLQMNSLRAE | |
| | | DTAVYYCVRHGNFGDEYVSWFAYWGQGTLVTVSS | |
| | VL | QAVVTQEPSLTVSPGGTVTLTCGSSTGAVTTSNYANWVQQKPGKS | 109 |
| | | PRGLIGGTNKRAPGVPARFSGSLLGGKAALTISGAQPEDEADYYCAL | |
| | | WYSNHWVFGGGTKLTVL | |
| | scFv | EVQLVESGGGLVQPGGSLRLSCAASGFTFSTYAMNWVRQAPGKGL | 121 |
| | | EWVGRIRSKYNNYATYYADSVKGRFTISRDDSKNTLYLQMNSLRAE | |
| | | DTAVYYCVRHGNFGDEYVSWFAYWGQGTLVTVSSGKPGSGKPGS | |
| | | GKPGSGKPGSQAVVTQEPSLTVSPGGTVTLTCGSSTGAVTTSNYAN | |
| | | WVQQKPGKSPRGLIGGTNKRAPGVPARFSGSLLGGKAALTISGAQP | |
| | | EDEADYYCALWYSNHWVFGGGTKLTVL | |
| CD3-25 | VH | EVQLVESGGGLVQPGGSLRLSCAASGFTFSTYAMNWVRQAPGKGL | 122 |
| | | EWVGRIRSKYNNYATYYADSVKGRFTISRDDSKNTLYLQMNSLRAE | |
| | | DTAVYYCVRHGNFGDPYVSWFAYWGQGTLVTVSS | |
| | VL | QAVVTQEPSLTVSPGGTVTLTCGSSTGAVTTSNYANWVQQKPGKS | 109 |
| | | PRGLIGGTNKRAPGVPARFSGSLLGGKAALTISGAQPEDEADYYCAL | |
| | | WYSNHWVFGGGTKLTVL | |
| | scFv | EVQLVESGGGLVQPGGSLRLSCAASGFTFSTYAMNWVRQAPGKGL | 123 |
| | | EWVGRIRSKYNNYATYYADSVKGRFTISRDDSKNTLYLQMNSLRAE | |
| | | DTAVYYCVRHGNFGDPYVSWFAYWGQGTLVTVSSGKPGSGKPGS | |
| | | GKPGSGKPGSQAVVTQEPSLTVSPGGTVTLTCGSSTGAVTTSNYAN | |
| | | WVQQKPGKSPRGLIGGTNKRAPGVPARFSGSLLGGKAALTISGAQP | |
| | | EDEADYYCALWYSNHWVFGGGTKLTVL | |
| CD3-26 | VH | EVQLVESGGGLVQPGGSLRLSCAASGFTFSTYAMNWVRQAPGKGL | 124 |
| | | EWVGRIRSKYNNYATYYADSVKGRFTISRDDSKNTLYLQMNSLRAE | |
| | | DTAVYYCVRHGNFGDSYVSWFDYWGQGTLVTVSS | |
| | VL | QAVVTQEPSLTVSPGGTVTLTCGSSTGAVTTSNYANWVQQKPGKS | 109 |
| | | PRGLIGGTNKRAPGVPARFSGSLLGGKAALTISGAQPEDEADYYCAL | |
| | | WYSNHWVFGGGTKLTVL | |
| | scFv | EVQLVESGGGLVQPGGSLRLSCAASGFTFSTYAMNWVRQAPGKGL | 125 |
| | | EWVGRIRSKYNNYATYYADSVKGRFTISRDDSKNTLYLQMNSLRAE | |
| | | DTAVYYCVRHGNFGDSYVSWFDYWGQGTLVTVSSGKPGSGKPGS | |
| | | GKPGSGKPGSQAVVTQEPSLTVSPGGTVTLTCGSSTGAVTTSNYAN | |
| | | WVQQKPGKSPRGLIGGTNKRAPGVPARFSGSLLGGKAALTISGAQP | |
| | | EDEADYYCALWYSNHWVFGGGTKLTVL | |
| CD3-27 | VH | EVQLVESGGGLVQPGGSLRLSCAASGFTFSTYAMSWVRQAPGKGL | 126 |
| | | EWVGRIRSKYNNYATYYADSVKGRFTISRDDSKNTLYLQMNSLRAE | |
| | | DTAVYYCVRHGNFGDSYVSWFAYWGQGTLVTVSS | |
| | VL | QAVVTQEPSLTVSPGGTVTLTCGSSTGAVTTSNYANWVQQKPGKS | 109 |
| | | PRGLIGGTNKRAPGVPARFSGSLLGGKAALTISGAQPEDEADYYCAL | |
| | | WYSNHWVFGGGTKLTVL | |
| | scFv | EVQLVESGGGLVQPGGSLRLSCAASGFTFSTYAMSWVRQAPGKGL | 127 |
| | | EWVGRIRSKYNNYATYYADSVKGRFTISRDDSKNTLYLQMNSLRAE | |
| | | DTAVYYCVRHGNFGDSYVSWFAYWGQGTLVTVSSGKPGSGKPGS | |
| | | GKPGSGKPGSQAVVTQEPSLTVSPGGTVTLTCGSSTGAVTTSNYAN | |
| | | WVQQKPGKSPRGLIGGTNKRAPGVPARFSGSLLGGKAALTISGAQP | |
| | | EDEADYYCALWYSNHWVFGGGTKLTVL | |
| CD3-28 | VH | EVQLVESGGGLVQPGGSLRLSCAASGFTFNTYAMNWVRQAPGKGL | 106 |
| | | EWVGRIRSKYNNYATYYADSVKGRFTISRDDSKNTLYLQMNSLRAE | |
| | | DTAVYYCVRHGNFGNSYVSWFAYWGQGTLVTVSS | |
| | VL | QAVVTQEPSLTVSPGGTVTLTCGSSTGAVTTSNYANWVQQKPGQA | 107 |
| | | PRGLIGGTNKRAPGVPARFSGSLLGGKAALTLSGAQPEDEAEYYCA | |
| | | LWYSNLWVFGGGTKLTVL | |
| | scFv | EVQLVESGGGLVQPGGSLRLSCAASGFTFNTYAMNWVRQAPGKGL | 128 |
| | | EWVGRIRSKYNNYATYYADSVKGRFTISRDDSKNTLYLQMNSLRAE | |
| | | DTAVYYCVRHGNFGNSYVSWFAYWGQGTLVTVSSGGGGSGGGGS | |
| | | GGGGSQAVVTQEPSLTVSPGGTVTLTCGSSTGAVTTSNYANWVQQ | |
| | | KPGQAPRGLIGGTNKRAPGVPARFSGSLLGGKAALTLSGAQPEDEA | |
| | | EYYCALWYSNLWVFGGGTKLTVLGSHHHHHH | |

[0373] CDR sequences for a number of CD3 binders as defined by the Kabat numbering scheme (Kabat et al, 1991, Sequences of Proteins of Immunological Interest, 5^{th} Ed. Public Health Service, National Institutes of Health, Bethesda, Md.), Chothia numbering scheme (Al-Lazikani et al., 1997, J. Mol. Biol 273:927-948), and a combination of Kabat and Chothia numbering are provided in Tables 7B-7D, respectively.

TABLE 7B
CD3 Binders-CDR sequences according to Kabat numbering scheme

| Binding | | | SEQ ID | | SEQ ID | | SEQ ID |
|---|---|---|---|---|---|---|---|
| Domain | Chain | CDR1 | NO: | CDR2 | NO: | CDR3 | NO: |
| CD3-1 | VH | RYTMH | 129 | YINPSRGYTNYNQK | 149 | YYDDHYCLDY | 173 |
| | | | | FKD | | | |
| | VL | SASSSVSYM | 130 | DTSKLAS | 150 | QQWSSNPFT | 174 |
| | | N | | | | | |
| CD3-2 | VH | TYAMN | 131 | RIRSKYNNYATYYA | 151 | HGNFGNSYVSW | 175 |
| | | | | DSVKD | | FAY | |
| | VL | RSSTGAVTT | 132 | GTNKRAP | 152 | ALWYSNLWV | 176 |
| | | SNYAN | | | | | |
| CD3-3 | VH | SYTMH | 133 | YINPSSGYTKYNQK | 153 | WQDYDVYFDY | 177 |
| | | | | FKD | | | |
| | VL | RASSSVSYM | 134 | ATSNLAS | 154 | QQWSSNPPT | 178 |
| | | H | | | | | |
| CD3-4 | VH | RYTMH | 129 | YINPSRGYTNYNQK | 149 | YYDDHYCLDY | 173 |
| | | | | FKD | | | |
| | VL | RASSSVSYM | 135 | DTSKVAS | 155 | QQWSSNPLT | 179 |
| | | N | | | | | |
| CD3-5 | VH | RYTMH | 129 | YINPSRGYTNYNQK | 156 | YYDDHYCLDY | 173 |
| | | | | VKD | | | |
| | VL | SASSSVSYM | 130 | DTSKLAS | 150 | QQWSSNPFT | 174 |
| | | N | | | | | |
| CD3-6 | VH | GYGMH | 136 | VIWYDGSKKYYVDS | 157 | QMGYWHFDL | 180 |
| | | | | VKG | | | |
| | VL | RASQSVSSY | 137 | DASNRAT | 158 | QQRSNWPPLT | 181 |
| | | LA | | | | | |
| CD3-7 | VH | TYAMN | 131 | RIRSKYNNYATYYA | 159 | VRHGNFGNSYV | 182 |
| | | | | D | | SWFAY | |
| | VL | RSSTGAVTT | 132 | GTNKRAP | 152 | ALWYSNLWV | 176 |
| | | SNYAN | | | | | |
| CD3-8 | VH | RYTMH | 129 | YINPSRGYTNYNQK | 149 | YYDDHYCLDY | 173 |
| | | | | FKD | | | |
| | VL | RASSSVSYM | 135 | DTSKVAS | 155 | QQWSSNPLT | 179 |
| | | N | | | | | |
| CD3-9 | VH | TYAMN | 131 | RIRSKYNNYATYYA | 159 | VRHGNFGNSYV | 182 |
| | | | | D | | SWFAY | |
| | VL | RSSTGAVTT | 132 | GTNKRAP | 152 | ALWYSNLWV | 176 |
| | | SNYAN | | | | | |
| CD3-10 | VH | TYAMN | 131 | RIRSKYNNYATYYA | 151 | HGNFGNSYVSW | 175 |
| | | | | DSVKD | | FAY | |
| | VL | RSSTGAVTT | 132 | GTNKRAP | 152 | ALWYSNLWV | 176 |
| | | SNYAN | | | | | |
| CD3-11 | VH | SYAMN | 138 | RIRSKYNNYATYYA | 160 | HGNFGNSYVSW | 183 |
| | | | | DSVKG | | WAY | |
| | VL | GSSTGAVTS | 139 | GTKFLAP | 161 | VLWYSNRWV | 184 |
| | | GNYPN | | | | | |
| CD3-12 | VH | KYAMN | 140 | RIRSKYNNYATYYA | 151 | HGNFGNSYISY | 185 |
| | | | | DSVKD | | WAY | |
| | VL | GSSTGAVTS | 139 | GTKFLAP | 161 | VLWYSNRWV | 184 |
| | | GNYPN | | | | | |
| CD3-13 | VH | RYTMH | 129 | YINPSRGYTNYNQK | 149 | YYDDHYCLDY | 173 |
| | | | | FKD | | | |
| | VL | SASSSVSYM | 130 | DTSKLAS | 150 | QQWSSNPFT | 174 |
| | | N | | | | | |
| CD3-14 | VH | TYAMN | 131 | RIRSKYNNYATYYA | 151 | HGNFGNSYVSW | 175 |
| | | | | DSVKD | | FAY | |
| | VL | RSSTGAVTT | 132 | GTNKRAP | 152 | ALWYSNLWV | 176 |
| | | SNYAN | | | | | |
| CD3-15 | VH | TYAMN | 131 | RIRSKYNNYATYYA | 151 | HGNFGNSYVSW | 175 |
| | | | | DSVKD | | FAY | |
| | VL | RSSTGAVTT | 132 | GTNKRAP | 152 | ALWYSNLWV | 176 |
| | | SNYAN | | | | | |
| CD3-16 | VH | TYAMN | 131 | RIRSKYNNYATYYA | 160 | HGNFGNSYVSW | 175 |
| | | | | DSVKG | | FAY | |
| | VL | GSSTGAVTT | 141 | GTNKRAP | 152 | ALWYSNLWV | 176 |
| | | SNYAN | | | | | |
| CD3-17 | VH | TYAMN | 131 | RIRSKYNNYATYYA | 160 | HGNFGDSYVSW | 186 |
| | | | | DSVKG | | FAY | |
| | VL | GSSTGAVTT | 141 | GTNKRAP | 152 | ALWYSNHWV | 187 |
| | | SNYAN | | | | | |
| CD3-18 | VH | RYTMH | 129 | YINPSRGYTNYNQK | 156 | YYDDHYCLDY | 173 |
| | | | | VKD | | | |
| | VL | SASSSVSYM | 130 | DTSKLAS | 150 | QQWSSNPFT | 174 |
| | | N | | | | | |
| CD3-19 | VH | RYTMH | 129 | YINPSRGYTNYNQK | 156 | YYDDHYSLDY | 188 |
| | | | | VKD | | | |
| | VL | SASSSVSYM | 130 | DTSKLAS | 150 | QQWSSNPFT | 174 |
| | | N | | | | | |
| CD3-20 | VH | GYTMN | 142 | LINPYKGVSTYNQK | 162 | SGYYGDSDWYF | 189 |
| | | | | FKD | | DV | |
| | VL | RASQDIRNY | 143 | YTSRLH | 163 | QQGNTLPWT | 190 |
| | | LN | | | | | |
| CD3-21 | VH | TYAMN | 131 | RIRSKYNNYATYYA | 151 | HGNFGNSYVSW | 175 |
| | | | | DSVKD | | FAY | |
| | VL | RSSTGAVTT | 132 | GTNKRAP | 152 | ALWYSNLWV | 176 |
| | | SNYAN | | | | | |
| CD3-22 | VH | TYAMN | 131 | RIRSKYNNYATYY | 160 | HGNFGDSYVS | 186 |
| | | | | ADSVKG | | WFAY | |
| | VL | GSSTGAVT | 141 | GTNKRAP | 152 | ALWYSNHWV | 187 |
| | | TSNYAN | | | | | |
| CD3-23 | VH | TYAMN | 131 | RIRSKANNYATYY | 164 | HGNFGDSYVS | 186 |
| | | | | ADSVKG | | WFAY | |
| | VL | GSSTGAVT | 141 | GTNKRAP | 152 | ALWYSNHWV | 187 |
| | | TSNYAN | | | | | |
| CD3-24 | VH | TYAMN | 131 | RIRSKYNNYATYY | 160 | HGNFGDEYVS | 191 |
| | | | | ADSVKG | | WFAY | |
| | VL | GSSTGAVT | 141 | GTNKRAP | 152 | ALWYSNHWV | 187 |
| | | TSNYAN | | | | | |
| CD3-25 | VH | TYAMN | 131 | RIRSKYNNYATYY | 160 | HGNFGDPYVS | 192 |
| | | | | ADSVKG | | WFAY | |
| | VL | GSSTGAVT | 141 | GTNKRAP | 152 | ALWYSNHWV | 187 |
| | | TSNYAN | | | | | |
| CD3-26 | VH | TYAMN | 131 | RIRSKYNNYATYY | 160 | HGNFGDSYVS | 193 |
| | | | | ADSVKG | | WFDY | |
| | VL | GSSTGAVT | 141 | GTNKRAP | 152 | ALWYSNHWV | 187 |
| | | TSNYAN | | | | | |
| CD3-27 | VH | TYAMS | 144 | RIRSKYNNYATYY | 160 | HGNFGDSYVS | 186 |
| | | | | ADSVKG | | WFAY | |
| | VL | GSSTGAVT | 141 | GTNKRAP | 152 | ALWYSNHWV | 187 |
| | | TSNYAN | | | | | |
| CD3-28 | VH | TYAMN | 131 | RIRSKYNNYATYY | 160 | HGNFGNSYVS | 175 |
| | | | | ADSVKG | | WFAY | |
| | VL | GSSTGAVT | 141 | GTNKRAP | 152 | ALWYSNLWV | 176 |
| | | TSNYAN | | | | | |
| CD3-29 | VH | TYAMN | 131 | RIRSKYNNYATYY | 160 | HGNFGNSYVS | 175 |
| | | | | ADSVKG | | WFAY | |
| | VL | GSSTGAVT | 141 | GTNKRAP | 152 | ALWYSNLWV | 176 |
| | | TSNYAN | | | | | |
| CD3-30 | VH | TYAMN | 131 | RIRSKYNNYATYY | 160 | HGNFGNSYVS | 175 |
| | | | | ADSVKG | | WFAY | |
| | VL | GSSTGAVT | 141 | GTNKRAP | 152 | ALWYSNLWV | 176 |
| | | TSNYAN | | | | | |
| CD3-31 | VH | TYAMN | 131 | RIRSKYNNYATYY | 160 | HGNFGNSYVS | 175 |
| | | | | ADSVKG | | WFAY | |
| | VL | GSSTGAVT | 141 | GTNKRAP | 152 | ALWYSNLWV | 176 |
| | | TSNYAN | | | | | |
| CD3-32 | VH | TYAMN | 131 | RIRSKYNNYATYY | 160 | HGNFGNSYVS | 175 |
| | | | | ADSVKG | | WFAY | |
| | VL | GSSTGAVT | 141 | GTNKRAP | 152 | ALWYSNLWV | 176 |
| | | TSNYAN | | | | | |
| CD3-33 | VH | TYAMN | 131 | RIRSKYNNYATYY | 160 | HGNFGNSYVS | 175 |
| | | | | ADSVKG | | WFAY | |
| | VL | GSSTGAVT | 141 | GTNKRAP | 152 | ALWYSNLWV | 176 |
| | | TSNYAN | | | | | |
| CD3-34 | VH | TYAMN | 131 | RIRSKYNNYATYY | 160 | HGNFGNSYVS | 175 |
| | | | | ADSVKG | | WFAY | |
| | VL | GSSTGAVT | 141 | GTNKRAP | 152 | ALWYSNLWV | 176 |
| | | TSNYAN | | | | | |
| CD3-35 | VH | TYAMH | 145 | RIRSKYNNYATYY | 160 | HGNFGNSYVS | 175 |
| | | | | ADSVKG | | WFAY | |
| | VL | GSSTGAVT | 141 | GTNKRAP | 152 | ALWYSNLWV | 176 |
| | | TSNYAN | | | | | |
| CD3-36 | VH | TYAMS | 144 | RIRSKYNNYATYY | 160 | HGNFGNSYVS | 175 |
| | | | | ADSVKG | | WFAY | |
| | VL | GSSTGAVT | 141 | GTNKRAP | 152 | ALWYSNLWV | 176 |
| | | TSNYAN | | | | | |
| CD3-37 | VH | TYAMN | 131 | RIRSKYNNYATYY | 160 | HGNFGNSYVS | 175 |
| | | | | ADSVKG | | WFAY | |
| | VL | GSSTGAVT | 141 | GTNKRAP | 152 | ALWYSNLWV | 176 |
| | | TSNYAN | | | | | |
| CD3-38 | VH | TYAMN | 131 | RIRSKANNYYATY | 165 | HGNFGNSYVS | 175 |
| | | | | YADSVKG | | WFAY | |
| | VL | GSSTGAVT | 141 | GTNKRAP | 152 | ALWYSNLWV | 176 |
| | | TSNYAN | | | | | |
| CD3-39 | VH | TYAMN | 131 | RIRSKANSYATYY | 166 | HGNFGNSYVS | 175 |
| | | | | ADSVKG | | WFAY | |
| | VL | GSSTGAVT | 141 | GTNKRAP | 152 | ALWYSNLWV | 176 |
| | | TSNYAN | | | | | |
| CD3-40 | VH | TYAMN | 131 | RIRSKYNNYATAY | 167 | HGNFGNSYVS | 175 |
| | | | | ADSVKG | | WFAY | |
| | VL | GSSTGAVT | 141 | GTNKRAP | 152 | ALWYSNLWV | 176 |
| | | TSNYAN | | | | | |
| CD3-41 | VH | TYAMN | 131 | RIRSKYNNYATYY | 160 | HGNFGNSYVS | 175 |
| | | | | ADSVKG | | WFAY | |
| | VL | GSSTGAVT | 141 | GTNKRAP | 152 | ALWYSNLWV | 176 |
| | | TSNYAN | | | | | |
| CD3-42 | VH | TYAMN | 131 | RIRSKYNNYATYY | 160 | HGNFGNSYVS | 175 |
| | | | | ADSVKG | | WFAY | |
| | VL | GSSTGAVT | 141 | GTNKRAP | 152 | ALWYSNLWV | 176 |
| | | TSNYAN | | | | | |
| CD3-43 | VH | TYAMN | 131 | RIRSKYNNYATYY | 160 | HGNFGNSYVS | 175 |
| | | | | ADSVKG | | WFAY | |
| | VL | GSSTGAVT | 141 | GTNKRAP | 152 | ALWYSNLWV | 176 |
| | | TSNYAN | | | | | |
| CD3-44 | VH | TYAMN | 131 | RIRSKYNNYATYY | 160 | HGNFGNSYVS | 175 |
| | | | | ADSVKG | | WFAY | |
| | VL | GSSTGAVT | 141 | GTNKRAP | 152 | ALWYSNLWV | 176 |
| | | TSNYAN | | | | | |
| CD3-45 | VH | TYAMN | 131 | RIRSKYNNYATYY | 160 | HGNFGNSYVS | 175 |
| | | | | ADSVKG | | WFAY | |
| | VL | GSSTGAVT | 141 | GTNKRAP | 152 | ALWYSNLWV | 176 |
| | | TSNYAN | | | | | |
| CD3-46 | VH | TYAMN | 131 | RIRSKYNNYATYY | 160 | HGNFGNSYVS | 175 |
| | | | | ADSVKG | | WFAY | |
| | VL | GSSTGAVT | 141 | GTNKRAP | 152 | ALWYSNLWV | 176 |
| | | TSNYAN | | | | | |
| CD3-47 | VH | TYAMN | 131 | RIRSKYNNYATYY | 160 | HGNFGNSYVS | 175 |
| | | | | ADSVKG | | WFAY | |
| | VL | GSSTGAVT | 141 | GTNKRAP | 152 | ALWYSNLWV | 176 |
| | | TSNYAN | | | | | |
| CD3-48 | VH | TYAMN | 131 | RIRSKYNNYATYY | 160 | HGNFGNSYVS | 175 |
| | | | | ADSVKG | | WFAY | |
| | VL | GSSTGAVT | 141 | GTNKRAP | 152 | ALWYSNLWV | 176 |
| | | TSNYAN | | | | | |
| CD3-49 | VH | TYAMN | 131 | RIRSKYNNYATYY | 160 | HGNFGNSYVS | 175 |
| | | | | ADSVKG | | WFAY | |
| | VL | GSSTGAVT | 141 | GTNKRAP | 152 | ALWYSNLWV | 176 |
| | | TSNYAN | | | | | |
| CD3-50 | VH | TYAMN | 131 | RIRSKYNNYATYY | 160 | HGNFGDSYVS | 186 |
| | | | | ADSVKG | | WFAY | |
| | VL | GSSTGAVT | 141 | GTNKRAP | 152 | ALWYSNLWV | 176 |
| | | TSNYAN | | | | | |
| CD3-51 | VH | TYAMN | 131 | RIRSKYNNYATYY | 160 | HGNFGQSYVS | 194 |
| | | | | ADSVKG | | WFAY | |
| | VL | GSSTGAVT | 141 | GTNKRAP | 152 | ALWYSNLWV | 176 |
| | | TSNYAN | | | | | |
| CD3-52 | VH | TYAMN | 131 | RIRSKYNNYATYY | 160 | HGNFGNSYVS | 175 |
| | | | | ADSVKG | | WFAY | |
| | VL | GSSTGAVT | 141 | GTNKRAP | 152 | ALWYSNLWV | 176 |
| | | TSNYAN | | | | | |
| CD3-53 | VH | TYAMN | 131 | RIRSKYNNYATYY | 160 | HGNFGNSYVS | 195 |
| | | | | ADSVKG | | WFDY | |
| | VL | GSSTGAVT | 141 | GTNKRAP | 152 | ALWYSNLWV | 176 |
| | | TSNYAN | | | | | |
| CD3-54 | VH | TYAMN | 131 | RIRSKYNNYATYY | 160 | HGNFGNSYVS | 175 |
| | | | | ADSVKG | | WFAY | |
| | VL | GSSTGAVT | 141 | GTNKRAP | 152 | ALWYSNLWV | 176 |
| | | TSNYAN | | | | | |
| CD3-55 | VH | TYAMN | 131 | RIRSKYNNYATYY | 160 | HGNFGNSYVS | 175 |
| | | | | ADSVKG | | WFAY | |
| | VL | GSSTGAVT | 141 | GTNKRAP | 152 | ALWYSNLWV | 176 |
| | | TSNYAN | | | | | |
| CD3-56 | VH | TYAMN | 131 | RIRSKYNNYATYY | 160 | HGNFGNSYVS | 175 |
| | | | | ADSVKG | | WFAY | |
| | VL | GSSTGAVT | 141 | GTNKRAP | 152 | ALWYSNLWV | 176 |
| | | TSNYAN | | | | | |
| CD3-57 | VH | TYAMN | 131 | RIRSKYNNYATYY | 160 | HGNFGNSYVS | 175 |
| | | | | ADSVKG | | WFAY | |
| | VL | GSSTGAVT | 141 | GTNKRAP | 152 | ALWYSNLWV | 176 |
| | | TSNYAN | | | | | |
| CD3-58 | VH | TYAMN | 131 | RIRSKYNNYATYY | 160 | HGNFGNSYVS | 175 |
| | | | | ADSVKG | | WFAY | |
| | VL | GSSTGAVT | 141 | GTNKRAP | 152 | ALWYSNLWV | 176 |
| | | TSNYAN | | | | | |
| CD3-59 | VH | TYAMN | 131 | RIRSKYNNYATYY | 160 | HGNFGNSYVS | 175 |
| | | | | ADSVKG | | WFAY | |
| | VL | GSSTGAVT | 141 | GTNKRAP | 152 | ALWYSNLWV | 176 |
| | | TSNYAN | | | | | |
| CD3-60 | VH | TYAMN | 131 | RIRSKYNNYATYY | 160 | HGNFGNSYVS | 175 |
| | | | | ADSVKG | | WFAY | |
| | VL | GSSTGAVT | 146 | GTNKRAP | 152 | ALWYSNLWV | 176 |
| | | SSNYAN | | | | | |
| CD3-61 | VH | TYAMN | 131 | RIRSKYNNYATYY | 160 | HGNFGNSYVS | 175 |
| | | | | ADSVKG | | WFAY | |
| | VL | GSSTGAVT | 147 | GTNKRAP | 152 | ALWYSNLWV | 176 |
| | | SGHYAN | | | | | |
| CD3-62 | VH | TYAMN | 131 | RIRSKYNNYATYY | 160 | HGNFGNSYVS | 175 |
| | | | | ADSVKG | | WFAY | |
| | VL | GSSTGAVT | 141 | DTNKRAP | 168 | ALWYSNLWV | 176 |
| | | TSNYAN | | | | | |
| CD3-63 | VH | TYAMN | 131 | RIRSKYNNYATYY | 160 | HGNFGNSYVS | 175 |
| | | | | ADSVKG | | WFAY | |
| | VL | GSSTGAVT | 141 | GTNNRAP | 169 | ALWYSNLWV | 176 |
| | | TSNYAN | | | | | |
| CD3-64 | VH | TYAMN | 131 | RIRSKYNNYATYY | 160 | HGNFGNSYVS | 175 |
| | | | | ADSVKG | | WFAY | |
| | VL | GSSTGAVT | 141 | GTNKRAS | 170 | ALWYSNLWV | 176 |
| | | TSNYAN | | | | | |
| CD3-65 | VH | TYAMN | 131 | RIRSKYNNYATYY | 160 | HGNFGNSYVS | 175 |
| | | | | ADSVKG | | WFAY | |
| | VL | GSSTGAVT | 141 | GTSNKHS | 171 | ALWYSNLWV | 176 |
| | | TSNYAN | | | | | |
| CD3-66 | VH | TYAMN | 131 | RIRSKYNNYATYY | 160 | HGNFGNSYVS | 175 |
| | | | | ADSVKG | | WFAY | |
| | VL | GSSTGAVT | 141 | GTNKRAP | 152 | ALWYSNLWV | 176 |
| | | TSNYAN | | | | | |
| CD3-67 | VH | TYAMN | 131 | RIRSKYNNYATYY | 160 | HGNFGNSYVS | 175 |
| | | | | ADSVKG | | WFAY | |
| | VL | GSSTGAVT | 141 | GTNKRAP | 152 | ALWYSNLWV | 176 |
| | | TSNYAN | | | | | |
| CD3-68 | VH | TYAMN | 131 | RIRSKYNNYATYY | 160 | HGNFGNSYVS | 175 |
| | | | | ADSVKG | | WFAY | |
| | VL | GSSTGAVT | 141 | GTNKRAP | 152 | ALWYSNLWV | 176 |
| | | TSNYAN | | | | | |
| CD3-69 | VH | TYAMN | 131 | RIRSKYNNYATYY | 160 | HGNFGNSYVS | 175 |
| | | | | ADSVKG | | WFAY | |
| | VL | GSSTGAVT | 141 | GTNKRAP | 152 | ALWYSNLWV | 176 |
| | | TSNYAN | | | | | |
| CD3-70 | VH | TYAMN | 131 | RIRSKYNNYATYY | 160 | HGNFGNSYVS | 175 |
| | | | | ADSVKG | | WFAY | |
| | VL | GSSTGAVT | 141 | GTNKRAP | 152 | ALWYSNLWV | 176 |
| | | TSNYAN | | | | | |
| CD3-71 | VH | TYAMN | 131 | RIRSKYNNYATYY | 160 | HGNFGNSYVS | 175 |
| | | | | ADSVKG | | WFAY | |
| | VL | GSSTGAVT | 141 | GTNKRAP | 152 | ALWYSNLWV | 176 |
| | | TSNYAN | | | | | |
| CD3-72 | VH | TYAMN | 131 | RIRSKYNNYATYY | 160 | HGNFGNSYVS | 175 |
| | | | | ADSVKG | | WFAY | |
| | VL | GSSTGAVT | 141 | GTNKRAP | 152 | ALWYSNLWV | 176 |
| | | TSNYAN | | | | | |
| CD3-73 | VH | TYAMN | 131 | RIRSKYNNYATYY | 160 | HGNFGNSYVS | 175 |
| | | | | ADSVKG | | WFAY | |
| | VL | GSSTGAVT | 141 | GTNKRAP | 152 | LLWYSNLWV | 196 |
| | | TSNYAN | | | | | |
| CD3-74 | VH | TYAMN | 131 | RIRSKYNNYATYY | 160 | HGNFGNSYVS | 175 |
| | | | | ADSVKG | | WFAY | |
| | VL | GSSTGAVT | 141 | GTNKRAP | 152 | ALWYSNHWV | 187 |
| | | TSNYAN | | | | | |
| CD3-75 | VH | TYAMN | 131 | RIRSKYNNYATYY | 160 | HGNFGNSYVS | 175 |
| | | | | ADSVKG | | WFAY | |
| | VL | GSSTGAVT | 141 | GTNKRAP | 152 | ALWYSNLWV | 176 |
| | | TSNYAN | | | | | |
| CD3-76 | VH | TYAMN | 131 | RIRSKYNNYATYY | 160 | HGNFGNSYVS | 175 |
| | | | | ADSVKG | | WFAY | |
| | VL | RSSTGAVT | 132 | GTNKRAP | 152 | ALWYSNLWV | 176 |
| | | TSNYAN | | | | | |
| CD3-77 | VH | TYAMN | 131 | RIRSKYNNYATYY | 160 | HGNFGNSYVS | 175 |
| | | | | ADSVKG | | WFAY | |
| | VL | KSSTGAVT | 148 | GTNKRAP | 152 | ALWYSNLWV | 176 |
| | | TSNYAN | | | | | |
| CD3-78 | VH | TYAMN | 131 | RIRSKYNNYATYY | 160 | HGNFGNSYVS | 175 |
| | | | | ADSVKG | | WFAY | |
| | VL | GSSTGAVT | 141 | GTNKRAP | 152 | ALWYSNHWV | 187 |
| | | TSNYAN | | | | | |
| CD3-79 | VH | TYAMN | 131 | RIRSKYNNYATYY | 160 | HGNFGNSYVS | 175 |
| | | | | ADSVKG | | WFAY | |
| | VL | GSSTGAVT | 141 | GTNKRAP | 152 | ALWYSNLWV | 176 |
| | | TSNYAN | | | | | |
| CD3-80 | VH | TYAMN | 131 | RIRSKYNNYATYY | 160 | HGNFGNSYVS | 175 |
| | | | | ADSVKG | | WFAY | |
| | VL | GSSTGAVT | 141 | GTNKRAP | 152 | ALWYSNLWV | 176 |
| | | TSNYAN | | | | | |
| CD3-81 | VH | TYAMN | 131 | RIRSKYNNYATYY | 160 | HGNFGNSYVS | 175 |
| | | | | ADSVKG | | WFAY | |
| | VL | GSSTGAVT | 141 | GTNKRAP | 152 | ALWYSNLWV | 176 |
| | | TSNYAN | | | | | |
| CD3-82 | VH | TYAMN | 131 | RIRSKYNNYATYY | 160 | HGNFGNSYVS | 175 |
| | | | | ADSVKG | | WFAY | |
| | VL | GSSTGAVT | 141 | GTNKRAP | 152 | ALWYSNLWV | 176 |
| | | TSNYAN | | | | | |
| CD3-83 | VH | TYAMN | 131 | RIRSKYNNYATYY | 160 | HGNFGNSYVS | 175 |
| | | | | ADSVKG | | WFAY | |
| | VL | GSSTGAVT | 141 | GTNKRAP | 152 | ALWYSNLWV | 176 |
| | | TSNYAN | | | | | |
| CD3-84 | VH | TYAMN | 131 | RIRSKYNNYATYY | 160 | HGNFGNSYVS | 175 |
| | | | | ADSVKG | | WFAY | |
| | VL | GSSTGAVT | 141 | GTNKRAP | 152 | ALWYSNLWV | 176 |
| | | TSNYAN | | | | | |
| CD3-85 | VH | TYAMN | 131 | RIRSKYNNYATYY | 160 | HGNFGNSYVS | 175 |
| | | | | ADSVKG | | WFAY | |
| | VL | GSSTGAVT | 141 | GTNKRAP | 152 | ALWYSNLWV | 176 |
| | | TSNYAN | | | | | |
| CD3-86 | VH | TYAMN | 131 | RIRSKYNNYATYY | 160 | HGNFGNSYVS | 175 |
| | | | | ADSVKG | | WFAY | |
| | VL | GSSTGAVT | 141 | GTNKRAP | 152 | ALWYSNLWV | 176 |
| | | TSNYAN | | | | | |
| CD3-87 | VH | TYAMN | 131 | RIRSKYNNYATYY | 160 | HGNFGDSYVS | 186 |
| | | | | ADSVKG | | WFAY | |
| | VL | GSSTGAVT | 141 | GTNKRAP | 152 | ALWYSNLWV | 176 |
| | | TSNYAN | | | | | |
| CD3-88 | VH | TYAMN | 131 | RIRSKYNNYATYY | 160 | HGNFGDSYVS | 186 |
| | | | | ADSVKG | | WFAY | |
| | VL | GSSTGAVT | 141 | GTNKRAP | 152 | ALWYSNLWV | 176 |
| | | TSNYAN | | | | | |
| CD3-89 | VH | TYAMN | 131 | RIRSKANNYATYY | 164 | HGNFGDSYVS | 186 |
| | | | | ADSVKG | | WFAY | |
| | VL | GSSTGAVT | 141 | GTNKRAP | 152 | ALWYSNLWV | 176 |
| | | TSNYAN | | | | | |
| CD3-90 | VH | TYAMN | 131 | RIRSKYNNYATYY | 160 | HGNFGDSYVS | 193 |
| | | | | ADSVKG | | WFDY | |
| | VL | GSSTGAVT | 141 | GTNKRAP | 152 | ALWYSNLWV | 176 |
| | | TSNYAN | | | | | |
| CD3-91 | VH | TYAMS | 144 | RIRSKANNYATYY | 164 | HGNFGDSYVS | 193 |
| | | | | ADSVKG | | WFDY | |
| | VL | GSSTGAVT | 141 | GTNKRAP | 152 | ALWYSNLWV | 176 |
| | | TSNYAN | | | | | |
| CD3-92 | VH | TYAMN | 131 | RIRSNGGYSTYYA | 172 | HGNFGNSYVS | 175 |
| | | | | DSVKG | | WFAY | |
| | VL | GSSTGAVT | 141 | GTNKRAP | 152 | ALWYSNLWV | 176 |
| | | TSNYAN | | | | | |
| CD3-93 | VH | TYAMN | 131 | RIRSKYNNYATYY | 160 | HGNFGNSYVS | 175 |
| | | | | ADSVKG | | WFAY | |
| | VL | GSSTGAVT | 141 | GTNKRAP | 152 | ALWYSNLWV | 176 |
| | | TSNYAN | | | | | |
| CD3-94 | VH | TYAMN | 131 | RIRSKYNNYATYY | 160 | HGNFGNSYVS | 175 |
| | | | | ADSVKG | | WFAY | |
| | VL | GSSTGAVT | 141 | GTNKRAP | 152 | ALWYSNLWV | 176 |
| | | TSNYAN | | | | | |
| CD3-95 | VH | TYAMN | 131 | RIRSKYNNYATYY | 160 | HGNFGNSYVS | 175 |
| | | | | ADSVKG | | WFAY | |
| | VL | GSSTGAVT | 141 | GTNKRAP | 152 | ALWYSNLWV | 176 |
| | | TSNYAN | | | | | |
| CD3-96 | VH | TYAMN | 131 | RIRSKYNNYATYY | 160 | HGNFGNSYVS | 175 |
| | | | | ADSVKG | | WFAY | |
| | VL | GSSTGAVT | 141 | GTNKRAP | 152 | ALWYSNHWV | 187 |
| | | TSNYAN | | | | | |
| CD3-97 | VH | TYAMN | 131 | RIRSKYNNYATYY | 160 | HGNFGDSYVS | 186 |
| | | | | ADSVKG | | WFAY | |
| | VL | GSSTGAVT | 141 | GTNKRAP | 152 | ALWYSNHWV | 187 |
| | | TSNYAN | | | | | |
| CD3-98 | VH | TYAMN | 131 | RIRSKYNNYATYY | 160 | HGNFGNSYVS | 175 |
| | | | | ADSVKG | | WFAY | |
| | VL | GSSTGAVT | 141 | GTNKRAP | 152 | ALWYSNHWV | 187 |
| | | TSNYAN | | | | | |
| CD3-99 | VH | TYAMN | 131 | RIRSKYNNYATYY | 160 | HGNFGNSYVS | 175 |
| | | | | ADSVKG | | WFAY | |
| | VL | GSSTGAVT | 141 | GTNKRAP | 152 | ALWYSNHWV | 187 |
| | | TSNYAN | | | | | |
| CD3-100 | VH | TYAMN | 131 | RIRSKYNNYATYY | 160 | HGNFGDSYVS | 186 |
| | | | | ADSVKG | | WFAY | |
| | VL | GSSTGAVT | 141 | GTNKRAP | 152 | ALWYSNHWV | 187 |
| | | TSNYAN | | | | | |
| CD3-101 | VH | TYAMN | 131 | RIRSKYNNYATYY | 160 | HGNFGDSYVS | 186 |
| | | | | ADSVKG | | WFAY | |
| | VL | GSSTGAVT | 141 | GTNKRAP | 152 | ALWYSNHWV | 187 |
| | | TSNYAN | | | | | |
| CD3-102 | VH | TYAMN | 131 | RIRSKYNNYATYY | 160 | HGNFGNSYVS | 175 |
| | | | | ADSVKG | | WFAY | |
| | VL | GSSTGAVT | 141 | GTNKRAP | 152 | ALWYSNHWV | 187 |
| | | TSNYAN | | | | | |
| CD3-103 | VH | TYAMN | 131 | RIRSKYNNYATYY | 160 | HGNFGNSYVS | 175 |
| | | | | ADSVKG | | WFAY | |
| | VL | GSSTGAVT | 141 | GTNKRAP | 152 | ALWYSNHWV | 187 |
| | | TSNYAN | | | | | |
| CD3-104 | VH | TYAMN | 131 | RIRSKYNNYATYY | 160 | HGNFGDSYVS | 186 |
| | | | | ADSVKG | | WFAY | |
| | VL | GSSTGAVT | 141 | GTNKRAP | 152 | ALWYSNHWV | 187 |
| | | TSNYAN | | | | | |
| CD3-105 | VH | TYAMN | 131 | RIRSKYNNYATYY | 160 | HGNFGDSYVS | 186 |
| | | | | ADSVKG | | WFAY | |
| | VL | GSSTGAVT | 141 | GTNKRAP | 152 | ALWYSNHWV | 187 |
| | | TSNYAN | | | | | |
| CD3-106 | VH | TYAMN | 131 | RIRSKYNNYATYY | 160 | HGNFGNSYVS | 175 |
| | | | | ADSVKG | | WFAY | |
| | VL | GSSTGAVT | 141 | GTNKRAP | 152 | ALWYSNHWV | 187 |
| | | TSNYAN | | | | | |
| CD3-107 | VH | TYAMN | 131 | RIRSKYNNYATYY | 160 | HGNFGNSYVS | 175 |
| | | | | ADSVKG | | WFAY | |
| | VL | GSSTGAVT | 141 | GTNKRAP | 152 | ALWYSNHWV | 187 |
| | | TSNYAN | | | | | |
| CD3-108 | VH | TYAMN | 131 | RIRSKYNNYATYY | 160 | HGNFGDSYVS | 186 |
| | | | | ADSVKG | | WFAY | |
| | VL | GSSTGAVT | 141 | GTNKRAP | 152 | ALWYSNHWV | 187 |
| | | TSNYAN | | | | | |
| CD3-109 | VH | TYAMN | 131 | RIRSKYNNYATYY | 160 | HGNFGDSYVS | 186 |
| | | | | ADSVKG | | WFAY | |
| | VL | GSSTGAVT | 141 | GTNKRAP | 152 | ALWYSNHWV | 187 |
| | | TSNYAN | | | | | |
| CD3-110 | VH | TYAMN | 131 | RIRSKYNNYATYY | 160 | HGNFGNSYVS | 175 |
| | | | | ADSVKG | | WFAY | |
| | VL | GSSTGAVT | 141 | GTNKRAP | 152 | ALWYSNHWV | 187 |
| | | TSNYAN | | | | | |
| CD3-111 | VH | TYAMN | 131 | RIRSKYNNYATYY | 160 | HGNFGNSYVS | 175 |
| | | | | ADSVKG | | WFAY | |
| | VL | GSSTGAVT | 141 | GTNKRAP | 152 | ALWYSNHWV | 187 |
| | | TSNYAN | | | | | |
| CD3-112 | VH | TYAMN | 131 | RIRSKYNNYATYY | 160 | HGNFGDSYVS | 186 |
| | | | | ADSVKG | | WFAY | |
| | VL | GSSTGAVT | 141 | GTNKRAP | 152 | ALWYSNHWV | 187 |
| | | TSNYAN | | | | | |
| CD3-113 | VH | TYAMN | 131 | RIRSKYNNYATYY | 160 | HGNFGDSYVS | 186 |
| | | | | ADSVKG | | WFAY | |
| | VL | GSSTGAVT | 141 | GTNKRAP | 152 | ALWYSNHWV | 187 |
| | | TSNYAN | | | | | |
| CD3-114 | VH | TYAMN | 131 | RIRSKYNNYATYY | 160 | HGNFGNSYVS | 175 |
| | | | | ADSVKG | | WFAY | |
| | VL | GSSTGAVT | 141 | GTNKRAP | 152 | ALWYSNHWV | 187 |
| | | TSNYAN | | | | | |
| CD3-115 | VH | TYAMN | 131 | RIRSKYNNYATYY | 160 | HGNFGNSYVS | 175 |
| | | | | ADSVKG | | WFAY | |
| | VL | GSSTGAVT | 141 | GTNKRAP | 152 | ALWYSNHWV | 187 |
| | | TSNYAN | | | | | |
| CD3-116 | VH | TYAMN | 131 | RIRSKYNNYATYY | 160 | HGNFGDSYVS | 186 |
| | | | | ADSVKG | | WFAY | |
| | VL | GSSTGAVT | 141 | GTNKRAP | 152 | ALWYSNHWV | 187 |
| | | TSNYAN | | | | | |
| CD3-117 | VH | TYAMN | 131 | RIRSKYNNYATYY | 160 | HGNFGDSYVS | 186 |
| | | | | ADSVKG | | WFAY | |
| | VL | GSSTGAVT | 141 | GTNKRAP | 152 | ALWYSNHWV | 187 |
| | | TSNYAN | | | | | |
| CD3-118 | VH | TYAMN | 131 | RIRSKYNNYATYY | 160 | HGNFGNSYVS | 175 |
| | | | | ADSVKG | | WFAY | |
| | VL | GSSTGAVT | 141 | GTNKRAP | 152 | ALWYSNHWV | 187 |
| | | TSNYAN | | | | | |
| CD3-119 | VH | TYAMN | 131 | RIRSKYNNYATYY | 160 | HGNFGNSYVS | 175 |
| | | | | ADSVKG | | WFAY | |
| | VL | GSSTGAVT | 141 | GTNKRAP | 152 | ALWYSNHWV | 187 |
| | | TSNYAN | | | | | |
| CD3-120 | VH | TYAMN | 131 | RIRSKYNNYATYY | 160 | HGNFGDSYVS | 186 |
| | | | | ADSVKG | | WFAY | |
| | VL | GSSTGAVT | 141 | GTNKRAP | 152 | ALWYSNHWV | 187 |
| | | TSNYAN | | | | | |
| CD3-121 | VH | TYAMN | 131 | RIRSKYNNYATYY | 160 | HGNFGDSYVS | 186 |
| | | | | ADSVKG | | WFAY | |
| | VL | GSSTGAVT | 141 | GTNKRAP | 152 | ALWYSNHWV | 187 |
| | | TSNYAN | | | | | |
| CD3-122 | VH | TYAMN | 131 | RIRSKYNNYATYY | 160 | HGNFGNSYVS | 175 |
| | | | | ADSVKG | | WFAY | |
| | VL | GSSTGAVT | 141 | GTNKRAP | 152 | ALWYSNHWV | 187 |
| | | TSNYAN | | | | | |
| CD3-123 | VH | TYAMN | 131 | RIRSKYNNYATYY | 160 | HGNFGNSYVS | 175 |
| | | | | ADSVKG | | WFAY | |
| | VL | GSSTGAVT | 141 | GTNKRAP | 152 | ALWYSNHWV | 187 |
| | | TSNYAN | | | | | |
| CD3-124 | VH | TYAMN | 131 | RIRSKYNNYATYY | 160 | HGNFGDSYVS | 186 |
| | | | | ADSVKG | | WFAY | |
| | VL | GSSTGAVT | 141 | GTNKRAP | 152 | ALWYSNHWV | 187 |
| | | TSNYAN | | | | | |
| CD3-125 | VH | TYAMN | 131 | RIRSKYNNYATYY | 160 | HGNFGDSYVS | 186 |
| | | | | ADSVKG | | WFAY | |
| | VL | GSSTGAVT | 141 | GTNKRAP | 152 | ALWYSNHWV | 187 |
| | | TSNYAN | | | | | |
| CD3-126 | VH | TYAMN | 131 | RIRSKYNNYATYY | 160 | HGNFGNSYVS | 175 |
| | | | | ADSVKG | | WFAY | |
| | VL | GSSTGAVT | 141 | GTNKRAP | 152 | ALWYSNHWV | 187 |
| | | TSNYAN | | | | | |
| CD3-127 | VH | TYAMN | 131 | RIRSKYNNYATYY | 160 | HGNFGNSYVS | 175 |
| | | | | ADSVKG | | WFAY | |
| | VL | GSSTGAVT | 141 | GTNKRAP | 152 | ALWYSNHWV | 187 |
| | | TSNYAN | | | | | |
| CD3-128 | VH | TYAMN | 131 | RIRSKYNNYATYY | 160 | HGNFGDSYVS | 186 |
| | | | | ADSVKG | | WFAY | |
| | VL | GSSTGAVT | 141 | GTNKRAP | 152 | ALWYSNHWV | 187 |
| | | TSNYAN | | | | | |

TABLE 7C
CD3 Binders - CDR sequences according to
Chothia numbering scheme

| | | | SEQ | | SEQ | | SEQ |
|---|---|---|---|---|---|---|---|
| Binding | | | ID | | ID | | ID |
| Domain | Chain | CDR1 | NO: | CDR2 | NO: | CDR3 | NO: |
| CD3-1 | VH | GYTFTRY | 197 | NPSRGY | 210 | YYDDHYCLDY | 173 |
| | VL | SSSVSY | 198 | DTS | 211 | WSSNPF | 222 |
| CD3-2 | VH | GFTFNTY | 199 | RSKYNN | 212 | HGNFGNSYVS | 175 |
| | | | | YA | | WFAY | |
| | VL | STGAVTTSNY | 200 | GTN | 213 | WYSNLW | 223 |
| CD3-3 | VH | GYTFTSY | 201 | NPSSGY | 214 | WQDYDVYFDY | 177 |
| | VL | SSSVSY | 198 | ATS | 215 | WSSNPP | 224 |
| CD3-4 | VH | GYTFTRY | 197 | NPSRGY | 210 | YYDDHYCLDY | 173 |
| | VL | SSSVSY | 198 | DTS | 211 | WSSNPL | 225 |
| CD3-5 | VH | GYTFTRY | 197 | NPSRGY | 210 | YYDDHYCLDY | 173 |
| | VL | SSSVSY | 198 | DTS | 211 | WSSNPF | 222 |
| CD3-6 | VH | GFKFSGY | 202 | WYDGSK | 216 | QMGYWHFDL | 180 |
| | VL | SQSVSSY | 203 | DAS | 217 | RSNWPPL | 226 |
| CD3-7 | VH | GFTFSTY | 204 | RSKYNN | 218 | HGNFGNSYVS | 227 |
| | | | | YAT | | WFA | |
| | VL | STGAVTTSNY | 200 | GTN | 213 | WYSNLW | 223 |
| CD3-8 | VH | GYTFTRY | 197 | NPSRGY | 210 | YYDDHYCLDY | 173 |
| | VL | SSSVSY | 198 | DTS | 211 | WSSNPL | 225 |
| CD3-9 | VH | GFTFNTY | 199 | RSKYNN | 218 | HGNFGNSYVS | 227 |
| | | | | YAT | | WFA | |
| | VL | STGAVTTSNY | 200 | GTN | 213 | WYSNLW | 223 |
| CD3-10 | VH | GFTFNTY | 199 | RSKYNN | 212 | HGNFGNSYVS | 175 |
| | | | | YA | | WFAY | |
| | VL | STGAVTTSNY | 200 | GTN | 213 | WYSNLW | 223 |
| CD3-11 | VH | GFTFNSY | 205 | RSKYNN | 212 | HGNFGNSYVS | 183 |
| | | | | YA | | WWAY | |
| | VL | STGAVTSGNY | 206 | GTK | 219 | WYSNRW | 228 |
| CD3-12 | VH | GFTFNKY | 207 | RSKYNN | 212 | HGNFGNSYISY | 185 |
| | | | | YA | | WAY | |
| | VL | STGAVTSGNY | 206 | GTK | 219 | WYSNRW | 228 |
| CD3-13 | VH | GYTFTRY | 197 | NPSRGY | 210 | YYDDHYCLDY | 173 |
| | VL | SSSVSY | 198 | DTS | 211 | WSSNPF | 222 |
| CD3-14 | VH | GFTFSTY | 204 | RSKYNN | 212 | HGNFGNSYVS | 175 |
| | | | | YA | | WFAY | |
| | VL | STGAVTTSNY | 200 | GTN | 213 | WYSNLW | 223 |
| CD3-15 | VH | GFTFNTY | 199 | RSKYNN | 212 | HGNFGNSYVS | 175 |
| | | | | YA | | WFAY | |
| | VL | STGAVTTSNY | 200 | GTN | 213 | WYSNLW | 223 |
| CD3-16 | VH | GFTFNTY | 199 | RSKYNN | 212 | HGNFGNSYVS | 175 |
| | | | | YA | | WFAY | |
| | VL | STGAVTTSNY | 200 | GTN | 213 | WYSNLW | 223 |
| CD3-17 | VH | GFTFSTY | 204 | RSKYNN | 212 | HGNFGDSYVS | 186 |
| | | | | YA | | WFAY | |
| | VL | STGAVTTSNY | 200 | GTN | 213 | WYSNHW | 229 |
| CD3-18 | VH | GYTFTRY | 197 | NPSRGY | 210 | YYDDHYCLDY | 173 |
| | VL | SSSVSY | 198 | DTS | 211 | WSSNPF | 222 |
| CD3-19 | VH | GYTFTRY | 197 | NPSRGY | 210 | YYDDHYSLDY | 188 |
| | VL | SSSVSY | 198 | DTS | 211 | WSSNPF | 222 |
| CD3-20 | VH | GYSFTGY | 208 | NPYKGV | 220 | SGYYGDSDWY | 189 |
| | | | | | | FDV | |
| | VL | SQDIRNY | 209 | YTS | 221 | GNTLPW | 230 |
| CD3-21 | VH | GFTFNTY | 199 | RSKYNN | 212 | HGNFGNSYVS | 175 |
| | | | | YA | | WFAY | |
| | VL | RSSTGAVTTS | 132 | GTNKRA | 152 | ALWYSNLWV | 176 |
| | | NYAN | | P | | | |

TABLE 7D
CD3 Binders - CDR sequences according to
combination of Kabat and Chothia
numbering schemes

| | | | SEQ | | SEQ | | SEQ |
|---|---|---|---|---|---|---|---|
| Binding | | | ID | | ID | | ID |
| Domain | Chain | CDR1 | NO: | CDR2 | NO: | CDR3 | NO: |
| CD3-1 | VH | GYTFTRYTM | 231 | YINPSRGYT | 149 | YYDDHYCL | 173 |
| | | H | | NYNQKFKD | | DY | |
| | VL | SASSSVSYM | 130 | DTSKLAS | 150 | QQWSSNPF | 174 |
| | | N | | | | T | |
| CD3-2 | VH | GFTFNTYAM | 232 | RIRSKYNNY | 151 | HGNFGNSY | 175 |
| | | N | | ATYYADSVK | | VSWFAY | |
| | | | | D | | | |
| | VL | RSSTGAVTT | 132 | GTNKRAP | 152 | ALWYSNLW | 176 |
| | | SNYAN | | | | V | |
| CD3-3 | VH | GYTFTSYTM | 233 | YINPSSGYT | 153 | WQDYDVYF | 177 |
| | | H | | KYNQKFKD | | DY | |
| | VL | RASSSVSYM | 134 | ATSNLAS | 154 | QQWSSNPP | 178 |
| | | H | | | | T | |
| CD3-4 | VH | GYTFTRYTM | 231 | YINPSRGYT | 149 | YYDDHYCL | 173 |
| | | H | | NYNQKFKD | | DY | |
| | VL | RASSSVSYM | 135 | DTSKVAS | 155 | QQWSSNPL | 179 |
| | | N | | | | T | |
| CD3-5 | VH | GYTFTRYTM | 231 | YINPSRGYT | 156 | YYDDHYCL | 173 |
| | | H | | NYNQKVKD | | DY | |
| | VL | SASSSVSYM | 130 | DTSKLAS | 150 | QQWSSNPF | 174 |
| | | N | | | | T | |
| CD3-6 | VH | GFKFSGYGM | 234 | VIWYDGSKK | 157 | QMGYWHFD | 180 |
| | | H | | YYVDSVKG | | L | |
| | VL | RASQSVSSY | 137 | DASNRAT | 158 | QQRSNWPP | 181 |
| | | LA | | | | LT | |
| CD3-7 | VH | GFTFSTYAM | 235 | RIRSKYNNY | 239 | HGNFGNSY | 175 |
| | | N | | ATYYADSVK | | VSWFAY | |
| | VL | RSSTGAVTT | 132 | GTNKRAP | 152 | ALWYSNLW | 176 |
| | | SNYAN | | | | V | |
| CD3-8 | VH | GYTFTRYTM | 231 | YINPSRGYT | 149 | YYDDHYCL | 173 |
| | | H | | NYNQKFKD | | DY | |
| | VL | RASSSVSYM | 135 | DTSKVAS | 155 | QQWSSNPL | 179 |
| | | N | | | | T | |
| CD3-9 | VH | GFTFNTYAM | 232 | RIRSKYNNY | 239 | HGNFGNSY | 175 |
| | | N | | ATYYADSVK | | VSWFAY | |
| | VL | RSSTGAVTT | 132 | GTNKRAP | 152 | ALWYSNLW | 176 |
| | | SNYAN | | | | V | |
| CD3-10 | VH | GFTFNTYAM | 232 | RIRSKYNNY | 151 | HGNFGNSY | 175 |
| | | N | | ATYYADSVK | | VSWFAY | |
| | | | | D | | | |
| | VL | RSSTGAVTT | 132 | GTNKRAP | 152 | ALWYSNLW | 176 |
| | | SNYAN | | | | V | |
| CD3-11 | VH | GFTFNSYAM | 236 | RIRSKYNNY | 160 | HGNFGNSY | 183 |
| | | N | | ATYYADSVK | | VSWWAY | |
| | | | | G | | | |
| | VL | GSSTGAVTS | 139 | GTKFLAP | 161 | VLWYSNRW | 184 |
| | | GNYPN | | | | V | |
| CD3-12 | VH | GFTFNKYAM | 237 | RIRSKYNNY | 151 | HGNFGNSY | 185 |
| | | N | | ATYYADSVK | | ISYWAY | |
| | | | | D | | | |
| | VL | GSSTGAVTS | 139 | GTKFLAP | 161 | VLWYSNRW | 184 |
| | | GNYPN | | | | V | |
| CD3-13 | VH | GYTFTRYTM | 231 | YINPSRGYT | 149 | YYDDHYCL | 173 |
| | | H | | NYNQKFKD | | DY | |
| | VL | SASSSVSYM | 130 | DTSKLAS | 150 | QQWSSNPF | 174 |
| | | N | | | | T | |
| CD3-14 | VH | GFTFSTYAM | 235 | RIRSKYNNY | 151 | HGNFGNSY | 175 |
| | | N | | ATYYADSVK | | VSWFAY | |
| | | | | D | | | |
| | VL | RSSTGAVTT | 132 | GTNKRAP | 152 | ALWYSNLW | 176 |
| | | SNYAN | | | | V | |
| CD3-15 | VH | GFTFNTYAM | 232 | RIRSKYNNY | 151 | HGNFGNSY | 175 |
| | | N | | ATYYADSVK | | VSWFAY | |
| | | | | D | | | |
| | VL | RSSTGAVTT | 132 | GTNKRAP | 152 | ALWYSNLW | 176 |
| | | SNYAN | | | | V | |
| CD3-16 | VH | GFTFNTYAM | 232 | RIRSKYNNY | 160 | HGNFGNSY | 175 |
| | | N | | ATYYADSVK | | VSWFAY | |
| | | | | G | | | |
| | VL | GSSTGAVTT | 141 | GTNKRAP | 152 | ALWYSNLW | 176 |
| | | SNYAN | | | | V | |
| CD3-17 | VH | GFTFSTYAM | 235 | RIRSKYNNY | 160 | HGNFGDSY | 186 |
| | | N | | ATYYADSVK | | VSWFAY | |
| | | | | G | | | |
| | VL | GSSTGAVTT | 141 | GTNKRAP | 152 | ALWYSNHW | 187 |
| | | SNYAN | | | | V | |
| CD3-18 | VH | GYTFTRYTM | 231 | YINPSRGYT | 156 | YYDDHYCL | 173 |
| | | H | | NYNQKVKD | | DY | |
| | VL | SASSSVSYM | 130 | DTSKLAS | 150 | QQWSSNPF | 174 |
| | | N | | | | T | |
| CD3-19 | VH | GYTFTRYTM | 231 | YINPSRGYT | 156 | YYDDHYSL | 188 |
| | | H | | NYNQKVKD | | DY | |
| | VL | SASSSVSYM | 130 | DTSKLAS | 150 | QQWSSNPF | 174 |
| | | N | | | | T | |
| CD3-20 | VH | GYSFTGYTM | 238 | LINPYKGVS | 162 | SGYYGDSD | 189 |
| | | N | | TYNQKFKD | | WYFDV | |
| | VL | RASQDIRNYL | 143 | YTSRLHS | 240 | QQGNTLPW | 190 |
| | | N | | | | T | |

[0374] In some embodiments, a TBM of the disclosure can comprise a CD3 ABM which comprises the CDRs of any of CD3-1 to CD3-128 as defined by Kabat numbering (e.g., as set forth in Table 7B). In other embodiments, a TBM of the disclosure can comprise a CD3 ABM which comprises the CDRs of any of CD3-1 to CD3-128 as defined by Chothia numbering (e.g., as set forth in Table 7C). In yet other embodiments, a TBM of the disclosure can comprise a CD3 ABM which comprises the CDRs of any of CD3-1 to CD3-128 as defined by a combination of Kabat and Chothia numbering (e.g., as set forth in Table 7D).

[0375] In some embodiments, a CD3 ABM comprises the CDR sequences of CD3-1. In some embodiments, a CD3 ABM comprises the CDR sequences of CD3-2. In some embodiments, a CD3 ABM comprises the CDR sequences of CD3-3. In some embodiments, a CD3 ABM comprises the CDR sequences of CD3-4. In some embodiments, a CD3 ABM comprises the CDR sequences of CD3-5. In some embodiments a CD3 ABM comprises the CDR sequences of CD3-6. In some embodiments, a CD3 ABM comprises the CDR sequences of CD3-7. In some embodiments, a CD3 ABM comprises the CDR sequences of CD3-8. In some embodiments, a CD3 ABM comprises the CDR sequences of CD3-9. In some embodiments, a CD3 ABM comprises the CDR sequences of CD3-10. In some embodiments, a CD3 ABM comprises the CDR sequences of CD3-11. In some embodiments, a CD3 ABM comprises the CDR sequences of CD3-12. In some embodiments, a CD3 ABM comprises the CDR sequences of CD3-13. In some embodiments, a CD3 ABM comprises the CDR sequences of CD3-14. In some embodiments, a CD3 ABM comprises the CDR sequences of CD3-15. In some embodiments, a CD3 ABM comprises the CDR sequences of CD3-16. In some embodiments, a CD3 ABM comprises the CDR sequences of CD3-17. In some embodiments, a CD3 ABM comprises the CDR sequences of CD3-18. In some embodiments, a CD3 ABM comprises the CDR sequences of CD3-19. In some embodiments, a CD3 ABM comprises the CDR sequences of CD3-20. In some embodiments, a CD3 ABM comprises the CDR sequences of CD3-21. In some embodiments, a CD3 ABM comprises the CDR sequences of CD3-22. In some embodiments, a CD3 ABM comprises the CDR sequences of CD3-23. In some embodiments, a CD3 ABM comprises the CDR sequences of CD3-24. In some embodiments, a CD3 ABM comprises the CDR sequences of CD3-25. In some embodiments, a CD3 ABM comprises the CDR sequences of CD3-26. In some embodiments, a CD3 ABM comprises the CDR sequences of CD3-27. In some embodiments, a CD3 ABM comprises the CDR sequences of CD3-28. In some embodiments, a CD3 ABM comprises the CDR sequences of CD3-29. In some embodiments, a CD3 ABM comprises the CDR sequences of CD3-30. In some embodiments, a CD3 ABM comprises the CDR sequences of CD3-31. In some embodiments, a CD3 ABM comprises the CDR sequences of CD3-32. In some embodiments, a CD3 ABM comprises the CDR sequences of CD3-33. In some embodiments, a CD3 ABM comprises the CDR sequences of CD3-34. In some embodiments, a CD3 ABM comprises the CDR sequences of CD3-35. In some embodiments, a CD3 ABM comprises the CDR sequences of CD3-36. In some embodiments, a CD3 ABM comprises the CDR sequences of CD3-37. In some embodiments, a CD3 ABM comprises the CDR sequences of CD3-38. In some embodiments, a CD3 ABM comprises the CDR sequences of CD3-39. In some embodiments, a CD3 ABM comprises the CDR sequences of CD3-40. In some embodiments, a CD3 ABM comprises the CDR sequences of CD3-41. In some embodiments, a CD3 ABM comprises the CDR sequences of CD3-42. In some embodiments, a CD3 ABM comprises the CDR sequences of CD3-43. In some embodiments, a CD3 ABM comprises the CDR sequences of CD3-44. In some embodiments, a CD3 ABM comprises the CDR sequences of CD3-45. In some embodiments, a CD3 ABM comprises the CDR sequences of CD3-46. In some embodiments, a CD3 ABM comprises the CDR sequences of CD3-47. In some embodiments, a CD3 ABM comprises the CDR sequences of CD3-48. In some embodiments, a CD3 ABM comprises the CDR sequences of CD3-49. In some embodiments, a CD3 ABM comprises the CDR sequences of CD3-50. In some embodiments, a CD3 ABM comprises the CDR sequences of CD3-51. In some embodiments, a CD3 ABM comprises the CDR sequences of CD3-52. In some embodiments, a CD3 ABM comprises the CDR sequences of CD3-53. In some embodiments, a CD3 ABM comprises the CDR sequences of CD3-54. In some embodiments, a CD3 ABM comprises the CDR sequences of CD3-55. In some embodiments, a CD3 ABM comprises the CDR sequences of CD3-56. In some embodiments, a CD3 ABM comprises the CDR sequences of CD3-57. In some embodiments, a CD3 ABM comprises the CDR sequences of CD3-58. In some embodiments, a CD3 ABM comprises the CDR sequences of CD3-59. In some embodiments, a CD3 ABM comprises the CDR sequences of CD3-60. In some embodiments, a CD3 ABM comprises the CDR sequences of CD3-61. In some embodiments, a CD3 ABM comprises the CDR sequences of CD3-62. In some embodiments, a CD3 ABM comprises the CDR sequences of CD3-63. In some embodiments, a CD3 ABM comprises the CDR sequences of CD3-64. In some embodiments, a CD3 ABM comprises the CDR sequences of CD3-65. In some embodiments, a CD3 ABM comprises the CDR sequences of CD3-66. In some embodiments, a CD3 ABM comprises the CDR sequences of CD3-67. In some embodiments, a CD3 ABM comprises the CDR sequences of CD3-68. In some embodiments, a CD3 ABM comprises the CDR sequences of CD3-69. In some embodiments, a CD3 ABM comprises the CDR sequences of CD3-70. In some embodiments, a CD3 ABM comprises the CDR sequences of CD3-71. In some embodiments, a CD3 ABM comprises the CDR sequences of CD3-72. In some embodiments, a CD3 ABM comprises the CDR sequences of CD3-73. In some embodiments, a CD3 ABM comprises the CDR sequences of CD3-74. In some embodiments, a CD3 ABM comprises the CDR sequences of CD3-75. In some embodiments, a CD3 ABM comprises the CDR sequences of CD3-76. In some embodiments, a CD3 ABM comprises the CDR sequences of CD3-77. In some embodiments, a CD3 ABM comprises the CDR sequences of CD3-78. In some embodiments, a CD3 ABM comprises the CDR sequences of CD3-79. In some embodiments, a CD3 ABM comprises the CDR sequences of CD3-80. In some embodiments, a CD3 ABM comprises the CDR sequences of CD3-81. In some embodiments, a CD3 ABM comprises the CDR sequences of CD3-82. In some embodiments, a CD3 ABM comprises the CDR sequences of CD3-83. In some embodiments, a CD3 ABM comprises the CDR sequences of CD3-84. In some embodiments, a CD3 ABM comprises the CDR sequences of CD3-85. In some embodiments, a CD3 ABM comprises the CDR sequences of CD3-86. In some embodiments, a CD3 ABM comprises the CDR sequences of CD3-87. In some embodiments, a CD3 ABM comprises the CDR sequences of CD3-88. In some embodiments, a CD3 ABM comprises the CDR sequences of CD3-89. In some embodiments, a CD3 ABM comprises the CDR sequences of CD3-90. In some embodiments, a CD3 ABM comprises the CDR sequences of CD3-91. In some embodiments, a CD3 ABM comprises the CDR sequences of CD3-92. In some embodiments, a CD3 ABM comprises the CDR sequences of CD3-93. In some embodiments, a CD3 ABM comprises the CDR sequences of CD3-94. In some embodiments, a CD3 ABM comprises the CDR sequences of CD3-95. In some embodiments, a CD3 ABM comprises the CDR sequences of CD3-96. In some embodiments, a CD3 ABM comprises the CDR sequences of CD3-97. In some embodiments, a CD3 ABM comprises the CDR sequences of CD3-98. In some embodiments, a CD3 ABM comprises the CDR sequences of CD3-99. In some embodiments, a CD3 ABM comprises the CDR sequences of CD3-100. In some embodiments, a CD3 ABM comprises the CDR sequences of CD3-101. In some embodiments, a CD3 ABM comprises the CDR sequences of CD3-102. In some embodiments, a CD3 ABM comprises the CDR sequences of CD3-103. In some embodiments, a CD3 ABM comprises the CDR sequences of CD3-104. In some embodiments, a CD3 ABM comprises the CDR sequences of CD3-105. In some embodiments, a CD3 ABM comprises the CDR sequences of CD3-106. In some embodiments, a CD3 ABM comprises the CDR sequences of CD3-107. In some embodiments, a CD3 ABM comprises the CDR sequences of CD3-108. In some embodiments, a CD3 ABM comprises the CDR sequences of CD3-109. In some embodiments, a CD3 ABM comprises the CDR sequences of CD3-110. In some embodiments, a CD3 ABM comprises the CDR sequences of CD3-111. In some embodiments, a CD3 ABM comprises the CDR sequences of CD3-112. In some embodiments, a CD3 ABM comprises the CDR sequences of CD3-113. In some embodiments, a CD3 ABM comprises the CDR sequences of CD3-114. In some embodiments, a CD3 ABM comprises the CDR sequences of CD3-115. In some embodiments, a CD3 ABM comprises the CDR sequences of CD3-116. In some embodiments, a CD3 ABM comprises the CDR sequences of CD3-117. In some embodiments, a CD3 ABM comprises the CDR sequences of CD3-118. In some embodiments, a CD3 ABM comprises the CDR sequences of CD3-119. In some embodiments, a CD3 ABM comprises the CDR sequences of CD3-120. In some embodiments, a CD3 ABM comprises the CDR sequences of CD3-121. In some embodiments, a CD3 ABM comprises the CDR sequences of CD3-122. In some embodiments, a CD3 ABM comprises the CDR sequences of CD3-123. In some embodiments, a CD3 ABM comprises the CDR sequences of CD3-124. In some embodiments, a CD3 ABM comprises the CDR sequences of CD3-125. In some embodiments, a CD3 ABM comprises the CDR sequences of CD3-126. In some embodiments, a CD3 ABM comprises the CDR sequences of CD3-127. In some embodiments, a CD3 ABM comprises the CDR sequences of CD3-128.

[0376] A TBM of the disclosure can comprise the complete heavy and light variable sequences of any of CD3-1 to CD3-128. In some embodiments, a TBM of the disclosure comprises a CD3 ABM which comprises the VH and VL sequences of CD3-1. In some embodiments, a TBM of the disclosure comprises a CD3 ABM which comprises the VH and VL sequences of CD3-1. In some embodiments, a TBM of the disclosure comprises a CD3 ABM which comprises the VH and VL sequences of CD3-2. In some embodiments, a TBM of the disclosure comprises a CD3 ABM which comprises the VH and VL sequences of CD3-3. In some embodiments, a TBM of the disclosure comprises a CD3 ABM which comprises the VH and VL sequences of CD3-4. In some embodiments, a TBM of the disclosure comprises a CD3 ABM which comprises the VH and VL sequences of CD3-5. In some embodiments, a TBM of the disclosure comprises a CD3 ABM which comprises the VH and VL sequences of CD3-6. In some embodiments, a TBM of the disclosure comprises a CD3 ABM which comprises the VH and VL sequences of CD3-7. In some embodiments, a TBM of the disclosure comprises a CD3 ABM which comprises the VH and VL sequences of CD3-8. In some embodiments, a TBM of the disclosure comprises a CD3 ABM which comprises the VH and VL sequences of CD3-9. In some embodiments, a TBM of the disclosure comprises a CD3 ABM which comprises the VH and VL sequences of CD3-10. In some embodiments, a TBM of the disclosure comprises a CD3 ABM which comprises the VH and VL sequences of CD3-11. In some embodiments, a TBM of the disclosure comprises a CD3 ABM which comprises the VH and VL sequences of CD3-12. In some embodiments, a TBM of the disclosure comprises a CD3 ABM which comprises the VH and VL sequences of CD3-13. In some embodiments, a TBM of the disclosure comprises a CD3 ABM which comprises the VH and VL sequences of CD3-14. In some embodiments, a TBM of the disclosure comprises a CD3 ABM which comprises the VH and VL sequences of CD3-15. In some embodiments, a TBM of the disclosure comprises a CD3 ABM which comprises the VH and VL sequences of CD3-16. In some embodiments, a TBM of the disclosure comprises a CD3 ABM which comprises the VH and VL sequences of CD3-17. In some embodiments, a TBM of the disclosure comprises a CD3 ABM which comprises the VH and VL sequences of CD3-18. In some embodiments, a TBM of the disclosure comprises a CD3 ABM which comprises the VH and VL sequences of CD3-19. In some embodiments, a TBM of the disclosure comprises a CD3 ABM which comprises the VH and VL sequences of CD3-20. In some embodiments, a TBM of the disclosure comprises a CD3 ABM which comprises the VH and VL sequences of CD3-21. In some embodiments, a TBM of the disclosure comprises a CD3 ABM which comprises the VH and VL sequences of CD3-22. In some embodiments, a TBM of the disclosure comprises a CD3 ABM which comprises the VH and VL sequences of CD3-23. In some embodiments, a TBM of the disclosure comprises a CD3 ABM which comprises the VH and VL sequences of CD3-24. In some embodiments, a TBM of the disclosure comprises a CD3 ABM which comprises the VH and VL sequences of CD3-25. In some embodiments, a TBM of the disclosure comprises a CD3 ABM which comprises the VH and VL sequences of CD3-26. In some embodiments, a TBM of the disclosure comprises a CD3 ABM which comprises the VH and VL sequences of CD3-27. In some embodiments, a TBM of the disclosure comprises a CD3 ABM which comprises the VH and VL sequences of CD3-28.

[0377] 6.5.2. TCR-α/β ABMs

[0378] The TBMs of the disclosure can contain an ABM that specifically binds to the TCR-α chain, the TCR-β chain, or the TCR-αβ dimer. Exemplary anti-TCR-α/β antibodies are known in the art (see, e.g., US 2012/0034221; Borst et al., 1990, Hum Immunol. 29(3):175-88 (describing antibody BMA031), the contents of each of which are incorporated herein by reference). The VH, VL, and Kabat CDR sequences of antibody BMA031 as described in US 2012/0034221 are provided in Table 8.

TABLE 8
BMA031 sequences

| | | SEQ |
|---|---|---|
| | | ID |
| Domain | Sequence | NO: |
| BMA031 | KASGYKFTSYVMH | 241 |
| CDR-H1 | | |
| BMA031 | YINPYNDVTKYNEKFK | 242 |
| CDR-H2 | | |
| BMA031 | GSYYDYDGFVY | 243 |
| CDR-H3 | | |
| BMA031 | SATSSVSYMH | 244 |
| CDR-L1 | | |
| BMA031 | DTSKLAS | 150 |
| CDR-L2 | | |
| BMA031 | QQWSSNPLT | 179 |
| CDR-L3 | | |
| BMA031 | EVQLQQSGPELVKPGASVKMSCKASGYKFTSYVM | 245 |
| VH | HWVKQKPGQGLEWIGYINPYNDVTKYNEKFKGKA | |
| | TLTSDKSSSTAYMELSSLTSEDSAVHYCARGSYY | |
| | DYDGFVYWGQGTLVTVSA | |
| BMA031 | QIVLTQSPAIMSASPGEKVTMTCSATSSVSYMHW | 246 |
| VL | YQQKSGTSPKRWIYDTSKLASGVPARFSGSGSGT | |
| | SYSLTISSMEAEDAATYYCQQWSSNPLTFGAGTK | |
| | LELK | |

[0379] In an embodiment, a TCR ABM can comprise the CDR sequences of antibody BMA031. In other embodiments, a TCR ABM can comprise the VH and VL sequences of antibody BMA031.

[0380] 6.5.3. TCR-γ/δ ABMs

[0381] The TBMs of the disclosure can contain an ABM that specifically binds to the TCR-γ chain, the TCR-δ chain, or the TCR-γδ dimer. Exemplary anti-TCR-γ/δ antibodies are known in the art (see, e.g., U.S. Pat. No. 5,980,892 (describing OTCS1, produced by the hybridoma deposited with the ATCC as accession number HB 9578), the contents of which are incorporated herein by reference).

### 6.6. CD2 ABMs

[0382] 6.6.1. Immunoglobulin-Based CD2 ABMs

[0383] In some embodiments, a TBM of the disclosure can comprise a ABM which is an anti-CD2 antibody or an antigen-binding domain thereof. Exemplary anti-CD2 antibodies are known in the art (see, e.g., U.S. Pat. No. 6,849,258, CN102827281A, US 2003/0139579 A1, and U.S. Pat. No. 5,795,572). Table 9 provides exemplary CDR, VH, and VL sequences that can be included in anti-CD2 antibodies or antigen-binding fragments thereof, for use in TBMs of the disclosure.

TABLE 9
Immunoglobulin Based CD2 Binders

| | | | SEQ |
|---|---|---|---|
| | Do- | | ID |
| Name | main | Sequence | NO: |
| CD2-1 | CDR- | EYYMY (Rat Lo-CD2a = BTI-322 | 247 |
| | H1 | from FIG. 33 of | |
| | | U.S. Pat. No. 6,849,258) | |
| CD2-1 | CDR- | RIDPEDGSIDYVEKFKK (Rat Lo- | 248 |
| | H2 | CD2a = BTI-322 from FIG. | |
| | | 33 of U.S. Pat. No. 6,849,258) | |
| CD2-1 | CDR- | GKFNYRFAY (Rat Lo-CD2a = | 249 |
| | H3 | BTI-322 from FIG. 33 of | |
| | | U.S. Pat. No. 6,849,258) | |
| CD2-1 | CDR- | RSSQSLLHSSGNTYLN (Rat Lo- | 250 |
| | L1 | CD2a = BTI-322 from FIG. | |
| | | 31 of U.S. Pat. No. 6,849,258) | |
| CD2-1 | CDR- | LVSKLES (Rat Lo-CD2a = | 251 |
| | L2 | BTI-322 from FIG. 31 of | |
| | | U.S. Pat. No. 6,849,258) | |
| CD2-1 | CDR- | QFTHYPYT (Rat Lo-CD2a = | 252 |
| | L3 | BTI-322 from FIG. 31 of | |
| | | U.S. Pat. No. 6,849,258) | |
| CD2-1 | VH | EVQLQQSGPELQRPGASVKLSCKASGY | 253 |
| | | IFTEYYMYWVKQRPKQGLELVGRIDPE | |
| | | DGSIDYVEKFKKKATLTADTSSNTAYM | |
| | | QLSSLTSEDTATYFCARGKFNYRFAYW | |
| | | GQGTLVTVSS (SEQ ID NO: 100 | |
| | | of U.S. Pat. No. 6,849,258) | |
| CD2-1 | VL | DVVLTQTPPTLLATIGQSVSISCRSSQ | 254 |
| | | SLLHSSGNTYLNWLLQRTGQSPQPLIY | |
| | | LVSKLESGVPNRFSGSGSGTDFTLKIS | |
| | | GVEAEDLGVYYCMQFTHYPYTFGAGTK | |
| | | LELK (Rat Lo-CD2a Vk from | |
| | | SEQ ID NO: 92, without signal | |
| | | sequence as shown in FIG. 31 | |
| | | of U.S. Pat. No. 6,849,258) | |
| hu1CD2- | VH | QVQLVQSGAEVKKPGASVKVSCKASGY | 255 |
| 1 | | TFTEYYMYWVRQAPGQGLELMGRIDPE | |
| | | DGSIDYVEKFKKKVTLTADTSSSTAYM | |
| | | ELSSLTSDDTAVYYCARGKFNYRFAYW | |
| | | GQGTLVTVSS (SEQ ID NO: 101 | |
| | | of U.S. Pat. No. 6,849,258) | |
| | VL | DVVMTQSPPSLLVTLGQPASISCRSSQ | 256 |
| | | SLLHSSGNTYLNWLLQRPGQSPQPLIY | |
| | | LVSKLESGVPDRFSGSGSGTDFTLKIS | |
| | | GVEAEDVGVYYCMQFTHYPYTFGQGTK | |
| | | LEIK (SEQ ID NO: 96 of | |
| | | U.S.Pat. No. 6,849,258) | |
| hu2CD2- | VH | EVQLQQSGPELQRPGASVKLSCKASGY | 257 |
| 1 | | IFTEYYMYWVKQRPKQGLELVGRIDPE | |
| | | DGSIDYVEKFKKKATLTADTSSNTAYM | |
| | | QLSSLTSEDTATYFCARGKFNYRFAYW | |
| | | GQGTLVTVSS (Vh of MEDI-507; | |
| | | SEQ ID NO: 105 of U.S. Pat. | |
| | | No. 6,849,258) | |
| | VL | DVVMTQSPPSLLVTLGQPASISCRSSQ | 256 |
| | | SLLHSSGNTYLNWLLQRPGQSPQPLIY | |
| | | LVSKLESGVPDRFSGSGSGTDFTLKIS | |
| | | GVEAEDVGVYYCMQFTHYPYTFGQGTK | |
| | | LEIK (SEQ ID NO: 96 of U.S. | |
| | | Pat. No. 6,849,258)(same as | |
| | | hu1CD2-1) | |

[0384] In some embodiments, a CD2 ABM comprises the CDR sequences of CD2-1 (SEQ ID NOS: 247-252). In some embodiments, a CD2 ABM comprises the heavy and light chain variable sequences of CD2-1 (SEQ ID NOS: 253-254). In some embodiments, a CD2 ABM comprises the heavy and light chain variable sequences of hu1CD2-1 (SEQ ID NOS: 255-256). In some embodiments, a CD2 ABM comprises the heavy and light chain variable sequences of hu2CD2-1 (SEQ ID NOS: 257 and 256, respectively).

[0385] In other embodiments, a CD2 ABM can comprise the CDR sequences of antibody 9D1 produced by the hybridoma deposited with the Chinese Culture Collection Committee General Microbiology Center on May 16, 2012 with accession no. CGMCC 6132, and which is described in CN102827281A. In other embodiments, a CD2 ABM can comprise the CDR sequences of antibody LO-CD2b produced by the hybridoma deposited with the American Type Culture Collection on Jun. 22, 1999 with accession no. PTA-802, and which is described in US 2003/0139579 A1. In yet other embodiments, a CD2 ABM can comprise the CDR sequences of the CD2 SFv-Ig produced by expression of the construct cloned in the recombinant E. coli deposited with the ATCC on Apr. 9, 1993 with accession no. 69277, and which is described in U.S. Pat. No. 5,795,572.

[0386] In other embodiments, a CD2 ABM can comprise the VH and VL sequences of antibody 9D1. In other embodiments, a CD2 ABM can comprise the VH and VL sequences of antibody LO-CD2b. In yet other embodiments, a CD2 ABM can comprise the VH and VL sequences of the CD2 SFv-Ig produced by expression of the construct cloned in the recombinant E. coli having ATCC accession no. 69277.

[0387] 6.6.2. CD58-Based CD2 ABMs

[0388] In certain aspects the present disclosure provides a TBM comprising a CD2 ABM which is a ligand. The CD2 ABM specifically binds to human CD2, whose natural ligand is CD58, also known as LFA-3. CD58/LFA-3 proteins are glycoproteins that are expressed on the surfaces of a variety of cell types (Dustin et al., 1991, Annu. Rev. Immunol. 9:27) and play roles in mediating T-cell interactions with APCs in both antigen-dependent and antigen-independent manners (Wallner et al., 1987, J. Exp. Med. 166:923). Accordingly, in certain aspects, the CD2 ABM is a CD58 moiety. As used herein, a CD58 moiety comprises an amino acid sequence comprising at least 70% sequence identity to a CD2-binding portion of CD58, e.g., at least 70%, 71%, 72%, 73%, 74%, 75%, 76%, 77%, 78%, 79%, 80%, 81%, 82%, 83%, 84%, 85%, 86%, 87%, 88%, 89%, 90%, 91%, 92%, 93%, 94%, 95%, 96%, 97%, 98%, or 99% identity to a CD2-binding portion of CD58. The sequence of human CD58 has the Uniprot identifier P19256 (www.uniprot.org/uniprot/P19256). It has been established that CD58 fragments containing amino acid residues 30-123 of full length CD58 (i.e., the sequence designated as CD58-4 in Table 10 below) are sufficient for binding to CD2. Wang et al., 1999, Cell 97:791-803. Accordingly, in certain aspects, a CD58 moiety comprises an amino acid sequence comprising at least 70% sequence identity to amino acids 30-123 of CD58, e.g., at least 70%, 71%, 72%, 73%, 74%, 75%, 76%, 77%, 78%, 79%, 80%, 81%, 82%, 83%, 84%, 85%, 86%, 87%, 88%, 89%, 90%, 91%, 92%, 93%, 94%, 95%, 96%, 97%, 98%, or 99% identity to the amino acid sequence designated CD58-4.

[0389] The interactions between CD58 and CD2 have been mapped through x-ray crystallography and molecular modeling. The substitution of residues E25, K29, K30, K32, D33, K34, E37, D84 and K87 (with numbering referring to the in the mature polypeptide) reduces binding to CD2. Ikemizu et al., 1999, Proc. Natl. Acad. Sci. USA 96:4289-94. Accordingly, in preferred embodiments the CD58 moiety of the disclosure retains the wild type residues at E25, K29, K30, K32, D33, K34, E37, D84 and K87.

[0390] In contrast, the following substitutions (with numbering referring to the full length polypeptide) did not impact binding to CD2: F29S; V37K; V49Q; V86K; T113S; and L121G. Accordingly, a CD58 moiety of the disclosure can include one, two, three, four, five or all six of the foregoing substitutions.

[0391] Exemplary CD58 moieties are provided in Table 10 below:

TABLE 10
CD58 sequences

| | | | SEQ |
|---|---|---|---|
| | Descrip- | | ID |
| Name | tion | Sequence | NO: |
| CD58- | Full | MVAGSDAGRA LGVLSVVCLL | 258 |
| 1 | length | HCFGFISCFS QQIYGVVYGN | |
| | CD58, | VTFHVPSNVP LKEVLWKKQK | |
| | including | DKVAELENSE FRAFSSFKNR | |
| | signal | VYLDTVSGSL TIYNLTSSDE | |
| | sequence | DEYEMESPNI TDTMKFFLYV | |
| | | LESLPSPTLT CALTNGSIEV | |
| | | QCMIPEHYNS HRGLIMYSWD | |
| | | CPMEQCKRNS TSIYFKMEND | |
| | | LPQKIQCTLS NPLFNTTSSI | |
| | | ILTTCIPSSG HSRHRYALIP | |
| | | IPLAVITTCI VLYMNGILKC | |
| | | DRKPDRTNSN | |
| CD58- | Extra- | FS QQIYGVVYGN VTFHVPSNVP | 259 |
| 2 | cellular | LKEVLWKKQK DKVAELENSE | |
| | domain of | FRAFSSFKNR VYLDTVSGSL | |
| | CD58, | TIYNLTSSDE DEYEMESPNI | |
| | corres- | TDTMKFFLYV LESLPSPTLT | |
| | ponding | CALTNGSIEV QCMIPEHYNS | |
| | to amino | HRGLIMYSWD CPMEQCKRNS | |
| | acids 29- | TSIYFKMEND LPQKIQCTLS | |
| | 215 of | NPLFNTTSSI ILTTCIPSSG | |
| | CD58 (WT) | HSRHR | |
| CD58- | Extra- | BS QQIYGVJYGN VTFHVPSNOP | 260 |
| 3 | cellular | LKEVLWKKQK DKVAELENSE | |
| | domain of | FRAFSSFKNR VYLDTUSGSL | |
| | CD58, | TIYNLTSSDE DEYEMESPNI | |
| | corres- | TDXMKFFLYV ZESLPSPTLT | |
| | ponding | CALTNGSIEV QCMIPEHYNS | |
| | to amino | HRGLIMYSWD CPMEQCKRNS | |
| | acids 29- | TSIYFKMEND LPQKIQCTLS | |
| | 215 of | NPLFNTTSSI ILTTCIPSSG | |
| | CD58 | HSRHR | |
| | (with | B = F or S | |
| | permitted | J = V or K | |
| | substi- | O = V or Q | |
| | tutions) | U = V or K | |
| | | X = T or S | |
| | | Z = L or G | |
| CD58- | Amino | S QQIYGVVYGN VTFHVPSNVP | 261 |
| 4 | acids 30- | LKEVLWKKQK DKVAELENSE | |
| | 123 (WT) | FRA | |
| CD58- | Amino | S QQIYGVJYGN VTFHVPSNOP | 262 |
| 5 | acids 30- | LKEVLWKKQK DKVAELENSE | |
| | 123 (with | FRA | |
| | permitted | J = V or K | |
| | substi- | O = V or Q | |
| | tutions) | | |

[0392] 6.6.3. CD48-Based CD2 ABMs

[0393] In certain aspects the present disclosure provides a TBM comprising a CD2 ABM which is CD48 moiety. As used herein, a CD48 moiety comprises an amino acid sequence comprising at least 70% sequence identity to a CD2-binding portion of CD48, e.g., at least 70%, 71%, 72%, 73%, 74%, 75%, 76%, 77%, 78%, 79%, 80%, 81%, 82%, 83%, 84%, 85%, 86%, 87%, 88%, 89%, 90%, 91%, 92%, 93%, 94%, 95%, 96%, 97%, 98%, or 99% identity to a CD2-binding portion of CD48. The sequence of human CD48 has the Uniprot identifier P09326 (www.uniprot.org/uniprot/P09326), which includes a signal peptide (amino acids 1-26) and a GPI anchor (amino acids 221-243). In certain aspects, a CD48 moiety comprises an amino acid sequence comprising at least 70% sequence identity (e.g., at least 70%, 71%, 72%, 73%, 74%, 75%, 76%, 77%, 78%, 79%, 80%, 81%, 82%, 83%, 84%, 85%, 86%, 87%, 88%, 89%, 90%, 91%, 92%, 93%, 94%, 95%, 96%, 97%, 98%, or 99% identity) to the amino acid sequence of consisting of amino acids 27-220 of Uniprot identifier P09326. Human CD48 has an Ig-like C2-type I domain (amino acids 29-127 of Uniprot identifier P09326) and a Ig-like C2 type 2 domain (amino acids 132-212 of Uniprot identifier P09326). Accordingly, in some embodiments, a CD48 moiety comprises an amino acid sequence comprising at least 70% sequence identity (e.g., at least 70%, 71%, 72%, 73%, 74%, 75%, 76%, 77%, 78%, 79%, 80%, 81%, 82%, 83%, 84%, 85%, 86%, 87%, 88%, 89%, 90%, 91%, 92%, 93%, 94%, 95%, 96%, 97%, 98%, or 99% identity) to the amino acid sequence of consisting of amino acids 29-212 of Uniprot identifier P09326, to the C2-type I domain (amino acids 29-127 of Uniprot identifier P09326) and/or to the Ig-like C2 type 2 domain (amino acids 132-212 of Uniprot identifier P09326). A CD48 moiety can in some embodiments comprise one or more natural variants relative to the sequence of Uniprot identifier P09326. For example, a CD48 moiety can include a E102Q substitution. As another example, a CD48 moiety can comprise an amino acid sequence corresponding to a CD-48 isoform or a CD2 binding portion thereof, e.g., the isoform having Uniprot identifier P09326-2 or a CD2 binding portion thereof.

### 6.7. Tumor-Associated Antigen ABMs

[0394] The TBMs of the disclosure comprise at least one ABMs that bind specifically to a tumor-associated antigen (TAA). Preferably, the TAA is a human TAA. The antigen may or may not be present on normal cells. In certain embodiments, the TAA is preferentially expressed or upregulated on tumor cells as compared to normal cells. In other embodiments, the TAA is a lineage marker.

[0395] It is anticipated that any type of tumor and any type of TAA may be targeted by the TBMs of the disclosure. Exemplary types of cancers that may be targeted include acute lymphoblastic leukemia, acute myelogenous leukemia, biliary cancer, B-cell leukemia, B-cell lymphoma, biliary cancer, bone cancer, brain cancer, breast cancer, triple-negative breast cancer, cervical cancer, Burkitt lymphoma, chronic lymphocytic leukemia, chronic myelogenous leukemia, colorectal cancer, endometrial cancer, esophageal cancer, gall bladder cancer, gastric cancer, gastrointestinal tract cancer, glioma, hairy cell leukemia, head and neck cancer, Hodgkin's lymphoma, liver cancer, lung cancer, medullary thyroid cancer, melanoma, multiple myeloma, ovarian cancer, non-Hodgkin's lymphoma, pancreatic cancer, prostate cancer, pulmonary tract cancer, renal cancer, sarcoma, skin cancer, testicular cancer, urothelial cancer, and other urinary bladder cancers. However, the skilled artisan will realize that TAAs are known for virtually any type of cancer.

[0396] Exemplary TAAs for which a TBM of the disclosure can be created include ABCF1; ACVR1; ACVR1B; ACVR2; ACVR2B; ACVRL1; ADORA2A; ADRB3; Aggrecan; AGR2; AICDA; AIF1; AIG1; AKAP1; AKAP2; ALK; AMH; AMHR2; ANGPT1; ANGPT2; ANGPTL3; ANGPTL4; ANPEP; APC; APOC1; AR; AZGP1 (zinc-a-glycoprotein); B7.1; B7.2; BAD; BAFF; BAG1; BAI1; BCL2; BCL6; BDNF; BLNK; BLR1 (MDR15); BlyS; BMP1; BMP2; BMP3B (GDF10); BMP4; BMP6; BMP8; BMPR1A; BMPR1B; BMPR2; BPAG1 (plectin); BRCA1; C19orf10 (IL27w); C3; C4A; C5; C5R1; Cadherin 17; CANT1; CASP1; CASP4; CAV1; CCBP2 (D6/JAB61); CCL1 (1-309); CCL11 (eotaxin); CCL13 (MCP-4); CCL15 (MIP-1d); CCL16 (HCC-4); CCL17 (TARC); CCL18 (PARC); CCL19 (MIP-3b); CCL2 (MCP-1); MCAF; CCL20 (MIP-3a); CCL21 (MIP-2); SLC; exodus-2; CCL22 (MDC/STC-1); CCL23 (MPIF-1); CCL24 (MPIF-2/eotaxin-2); CCL25 (TECK); CCL26 (eotaxin-3); CCL27 (CTACK/ILC); CCL28; CCL3 (MIP-1a); CCL4 (MIP-1b); CCL5 (RANTES); CCL7 (MCP-3); CCL8 (mcp-2); CCNA1; CCNA2; CCND1; CCNE1; CCNE2; CCR1 (CKR1/HM145); CCR2 (mcp-1RB/RA); CCR3 (CKR3/CMKBR3); CCR4; CCR5 (CMKBR5/ChemR13); CCR6 (CMKBR6/CKR-L3/STRL22/DRY6); CCR7 (CKR7/EBI1); CCR8 (CMKBR8/TER1/CKR-L1); CCR9 (GPR-9-6); CCRL1 (VSHK1); CCRL2 (L-CCR); CD164; CD19; CD1C; CD20; CD200; CD-22; CD24; CD28; CD3; CD37; CD38; CD3E; CD3G; CD3Z; CD4; CD32b; CD40; CD40L; CD44; CD45RB; CD52; CD69; CD72; CD74; CD79A; CD79B; CD8; CD80; CD81; CD83; CD86; CD97; CD179a; CDH1 (E-cadherin); CDH10; CDH12; CDH13; CDH18; CDH19; CDH20; CDH5; CDH7; CDH8; CDH9; CDK2; CDK3; CDK4; CDK5; CDK6; CDK7; CDK9; CDKN1A (p21Wap1/Cip1); CDKN1B (p27Kip1); CDKN1C; CDKN2A (p16INK4a); CDKN2B; CDKN2C; CDKN3; CEBPB; CER1; CHGA; CHGB; Chitinase; CHST10; CKLFSF2; CKLFSF3; CKLFSF4; CKLFSF5; CKLFSF6; CKLFSF7; CKLFSF8; CLDN3; CLDN6; CLDN7 (claudin-7); CLN3; CLU (clusterin); CMKLR1; CMKOR1 (RDC1); CNR1; COL18A1; COL1A1; COL4A3; COL6A1; CR2; CRP; CSF1 (M-CSF); CSF2 (GM-CSF); CSF3 (GCSF); CTLA4; CTNNB1 (b-catenin); CTSB (cathepsin B); CX3CL1 (SCYD1); CX3CR1 (V28); CXCL1 (GRO1); CXCL10(IP-10); CXCL11 (1-TAC/IP-9); CXCL12 (SDF1); CXCL13; CXCL14; CXCL16; CXCL2 (GRO2); CXCL3 (GRO3); CXCL5 (ENA-78/LIX); CXCL6 (GCP-2); CXCL9 (MIG); CXCR3 (GPR9/CKR-L2); CXCR4; CXCR6 (TYMSTR/STRL33/Bonzo); CYB5; CYC1; CYSLTR1; CGRP; C1q; C1r; C1; C4a; C4b; C2a; C2b; C3a; C3b; DAB21P; DES; DKFZp451J0118; DNCL1; DPP4; E-selectin; E2F1; ECGF1; EDG1; EFNA1; EFNA3; EFNB2; EGF; EGFR; EGFRvlll; ELAC2; ENG; ENO1; ENO2; ENO3; EPHB4; EPO; ERBB2 (Her-2); EREG; ERK8; ESR1; ESR2; F3 (TF); Factor VII; Factor IX; Factor V; Factor Vila; Factor Factor X; Factor XII; Factor XIII; FADD; FasL; FASN; FCER1A; FCER2; Fc gamma receptor; FCGR3A; FCRL5; FGF; FGF1 (aFGF); FGF10; FGF11; FGF12; FGF12B; FGF13; FGF14; FGF16; FGF17; FGF18; FGF19; FGF2 (bFGF); FGF20; FGF21; FGF22; FGF23; FGF3 (int-2); FGF4 (HST); FGF5; FGF6 (HST-2); FGF7 (KGF); FGF8; FGF9; FGFR3; FIGF (VEGFD); FIL1 (EPSILON); FIL1 (ZETA); FLJ12584; FLJ25530; FLRT1 (fibronectin); FLT1; Folate receptor alpha; Folate receptor beta; FOS; FOSL1 (FRA-1); Fucosyl GM1; FY (DARC); GABRP (GABAa); GAGEB1; GAGEC1; GALNAC4S-65T; GATA3; GDF5; GFI1; GGT1; GM-CSF; GloboH; GNAS1; GNRH1; GPNMB; GPR2 (CCR10); GPR20; GPR31; GPR44; GPR64; GPR81 (FKSG80); GPRC5D; GRCC10 (010); GRP; GSN (Gelsolin); GSTP1; glycoprotein (gP) IIb/IIIa; HAVCR1; HAVCR2; HDAC4; HDAC5; HDAC7A; HDAC9; Her2; HER3; HGF; HIF1A; HIP1; histamine and histamine receptors; HLA-A; HLA-DRA; HM74; HMGB1; HMOX1; HMWMAA; HUMCYT2A; ICEBERG; ICOSL; ID2; IFN-α; IFNA1; IFNA2; IFNA4; IFNA5; IFNA6; IFNA7; IFNB1; IFN-γ; IFNW1; IGBP1; IGF1; IGF1R; IGF2; IGFBP2; IGFBP3; IGFBP6; IL-1; IL-α; IL-1-β; IL10; IL10 RA; IL10 RB; IL11; IL11 RA; IL-12; IL12A; IL12B; IL12RB1; IL12RB2; IL13; IL13RA1; IL13RA2; IL14; IL15; IL15RA; IL16; IL17; IL17B; IL17C; IL17R; IL18; IL18BP; IL18R1; IL18RAP; IL19; IL1A; IL1B; IL1F10; IL1F5; IL1F6; IL1F7; IL1F8; IL1F9; IL1 HY1; IL1R1; IL1R2; IL1RAP; IL1RAPL1; IL1RAPL2; IL1RL1; IL1RL2; IL1RN; IL2; IL20; IL20RA; IL21R; IL22; IL22R; IL22RA2; IL23; IL24; IL25; IL26; IL27; IL28A; IL28B; IL29; IL2RA; IL2RB; IL2RG; IL3; IL30; IL3RA; IL4; IL4R; IL5; IL5RA; IL6; IL6R; IL6ST (glycoprotein 130); IL7; IL7R; IL8; IL8RA; IL8RB; IL8RB; IL9; IL9R; ILK; INHA; INHBA; INSL3; INSL4; IRAK1; IRAK2; ITGA1; ITGA2; ITGA3; ITGA6 (a6 integrin); ITGAV; ITGB3; ITGB4 (b 4 integrin); JAG1; JAK1; JAK3; JUN; K6HF; KAI1; KDR; KITLG; KLF5 (GC Box BP); KLF6; KLK10; KLK12; KLK13; KLK14; KLK15; KLK3; KLK4; KLK5; KLK6; KLK9; KRT1; KRT19 (Keratin 19); KRT2A; KRTHB6 (hair-specific type II keratin); L-selectin; LAMAS; LEP (leptin); Lingo-p75; Lingo-Troy; LRP6; LPS; LTA (TNF-b); LTB; LTB4R (GPR16); LTB4R2; LTBR; LY6K; LYPD8; MACMARCKS; MAG or Omgp; MAP2K7 (c-Jun); MDK; mesothelin; MIB1; midkine; MIF; MIP-2; MKI67 (Ki-67); MMP2; MMP9; MS4A1; MSMB; MT3 (metallothionectin-III); MTSS1; MUC1 (mucin); MYC; MYD88; NCK2; neurocan; NKG2D; NFKB1; NFKB2; NGF; NGFB (NGF); NGFR; NgR-Lingo; NgR-Nogo66 (Nogo); NgR-p75; NgR-Troy; NME1 (NM23A); NOX5; NPPB; NROB1; NROB2; NR1D1; NR1D2; NR1H2; NR1H3; NR1H4; NRII2; NRII3; NR2C1; NR2C2; NR2E1; NR2E3; NR2F1; NR2F2; NR2F6; NR3C1; NR3C2; NR4A1; NR4A2; NR4A3; NR5A1; NR5A2; NR6A1; NRP1; NRP2; NT5E; NTN4; NY-BR-1; o-acetyl-GD2; ODZ1; OPRD1; OR51E2; P2RX7; PANX3; PAP; PART1; PATE; PAWR; PCA3; PCNA; PDGFA; PDGFB; PECAM1; PF4 (CXCL4); PGE2; PGF; PGR; phosphacan; PIAS2; PIK3CG; PLAC1; plasminogen activator; PLAU (uPA); PLG; PLXDC1; polysialic acid; PPBP (CXCL7); PPID; PR1; PRKCQ; PRKD1; PRL; PROC; Protein C; PROK2; PSAP; PSCA; PTAFR; PTEN; PTGS2 (COX-2); PTN; RAC2 (p21Rac2); RAGE; RARB; RGS1; RGS13; RGS3; RNF110 (ZNF144); ROBO2; SUI0A2; SCGB1D2 (lipophilin B); SCGB2A1 (mammaglobin 2); SCGB2A2 (mammaglobin 1); SCYE1 (endothelial Monocyte-activating cytokine); SDF2; SERPINA1; SERPINA3; SERPINBS (maspin); SERPINE1 (PAI-1); SERPINF1; SHBG; SLA2; SLC2A2; SLC33A1; SLC34A2; SLC39A6; SLC43A1; SLIT2; SLITRK6; SPP1; SPRR1B (Spr1); ST6GAL1; STAB1; STATE; STEAP; STEAP2; substance P; TACSTD2; TB4R2; TBX21; TCP10; TDGF1; TEK; TEM1/CD248; TEM7R; TGFA; TGFB1; TGFB111; TGFB2; TGFB3; TGFBI; TGFBR1; TGFBR2; TGFBR3; TH1L; THBS1 (thrombospondin-1); THBS2; THBS4; THPO; TIE (Tie-1); TIMP3; tissue factor; TLR10; TLR2; TLR3; TLR4; TLR5; TLR6; TLR7; TLR8; TLR9; TNF; TNF-α; TNFAIP2 (B94); TNFAIP3; TNFRSF11A; TNFRSF1A; TNFRSF1B; TNFRSF21; TNFRSF5; TNFRSF6 (Fas); TNFRSF7; TNFRSF8; TNFRSF9; TNFSF10 (TRAIL); TNFSF11 (TRANCE); TNFSF12 (APO3L); TNFSF13 (April); TNFSF13B; TNFSF14 (HVEM-L); TNFSF15 (VEGI); TNFSF18; TNFSF4 (OX40 ligand); TNFSF5 (CD40 ligand); TNFSF6 (FasL); TNFSF7 (CD27 ligand); TNFSF8 (CD30 ligand); TNFSF9 (4-1BB ligand); TOLLIP; Toll-like receptors; TOP2A (topoisomerase ha); TP53; TPM1; TPM2; TRADD; TRAF1; TRAF2; TRAF3; TRAF4; TRAF5; TRAF6; TREM1; TREM2; TRPC6; TSHR; TSLP; TWEAK; thrombomodulin; thrombin; UPK2; VEGF; VEGFB; VEGFC; versican; VHL C5; VLA-4; XCL1 (lymphotactin); XCL2 (SCM-1b); XCR1 (GPRS/CCXCR1); YY1; and ZFPM2.

[0397] In some embodiments, the TAA is ADRB3. In some embodiments, the TAA is AKAP-4. In some embodiments, the TAA is ALK. In some embodiments, the TAA is androgen receptor. In some embodiments, the TAA is B7H3. In some embodiments, the TAA is BCMA. In some embodiments, the TAA is BORIS. In some embodiments, the TAA is BST2. In some embodiments, the TAA is Cadherin17. In some embodiments, the TAA is CAIX. In some embodiments, the TAA is CD171. In some embodiments, the TAA is CD179a. In some embodiments, the TAA is CD19. In some embodiments, the TAA is CD20. In some embodiments, the TAA is CD22. In some embodiments, the TAA is CD24. In some embodiments, the TAA is CD30. In some embodiments, the TAA is CD300LF. In some embodiments, the TAA is CD32b. In some embodiments, the TAA is CD33. In some embodiments, the TAA is CD38. In some embodiments, the TAA is CD44v6. In some embodiments, the TAA is CD72. In some embodiments, the TAA is CD79a. In some embodiments, the TAA is CD79b. In some embodiments, the TAA is CD97. In some embodiments, the TAA is CEA. In some embodiments, the TAA is CLDN6. In some embodiments, the TAA is CLEC12A. In some embodiments, the TAA is CLL-1. In some embodiments, the TAA is CS-1. In some embodiments, the TAA is CXORF61. In some embodiments, the TAA is Cyclin B1. In some embodiments, the TAA is CYP1B1. In some embodiments, the TAA is EGFR. In some embodiments, the TAA is EGFRvIII. In some embodiments, the TAA is EMR2. In some embodiments, the TAA is EPCAM. In some embodiments, the TAA is EphA2. In some embodiments, the TAA is EphB2. In some embodiments, the TAA is ERBB2. In some embodiments, the TAA is ERG (TMPRSS2 ETS fusion gene). In some embodiments, the TAA is ETV6-AML. In some embodiments, the TAA is FAP. In some embodiments, the TAA is FCAR. In some embodiments, the TAA is FCRL5. In some embodiments, the TAA is FLT3. In some embodiments, the TAA is FLT3. In some embodiments, the TAA is folate receptor alpha. In some embodiments, the TAA is folate receptor beta. In some embodiments, the TAA is Fos-related antigen 1. In some embodiments, the TAA is fucosyl GM1. In some embodiments, the TAA is GD2. In some embodiments, the TAA is GD2. In some embodiments, the TAA is GD3. In some embodiments, the TAA is GloboH. In some embodiments, the TAA is GM3. In some embodiments, the TAA is gp100Tn. In some embodiments, the TAA is GPC3. In some embodiments, the TAA is GPNMB. In some embodiments, the TAA is GPR20. In some embodiments, the TAA is GPRC5D. In some embodiments, the TAA is GPR64. In some embodiments, the TAA is HAVCR1. In some embodiments, the TAA is HER3. In some embodiments, the TAA is HMWMAA. In some embodiments, the TAA is hTERT. In some embodiments, the TAA is Igf-I receptor. In some embodiments, the TAA is IGLL1. In some embodiments, the TAA is IL-11Ra. In some embodiments, the TAA is IL-13Ra2. In some embodiments, the TAA is KIT. In some embodiments, the TAA is LAIR1. In some embodiments, the TAA is LCK. In some embodiments, the TAA is LewisY. In some embodiments, the TAA is LILRA2. In some embodiments, the TAA is LMP2. In some embodiments, the TAA is LRP6. In some embodiments, the TAA is LY6K. In some embodiments, the TAA is LY75. In some embodiments, the TAA is LYPD8. In some embodiments, the TAA is MAD-CT-1. In some embodiments, the TAA is MAD-CT-2. In some embodiments, the TAA is mesothelin. In some embodiments, the TAA is ML-IAP. In some embodiments, the TAA is MUC1. In some embodiments, the TAA is MYCN. In some embodiments, the TAA is NA17. In some embodiments, the TAA is NCAM. In some embodiments, the TAA is NKG2D. In some embodiments, the TAA is NY-BR-1. In some embodiments, the TAA is o-acetyl-GD2. In some embodiments, the TAA is OR51E2. In some embodiments, the TAA is OY-TES1. In some embodiments, the TAA is a p53 mutant. In some embodiments, the TAA is PANX3. In some embodiments, the TAA is PAX3. In some embodiments, the TAA is PAX5. In some embodiments, the TAA is PDGFR-beta. In some embodiments, the TAA is PLAC1. In some embodiments, the TAA is polysialic acid. In some embodiments, the TAA is PRSS21. In some embodiments, the TAA is PSCA. In some embodiments, the TAA is RhoC. In some embodiments, the TAA is ROR1. In some embodiments, the TAA is a sarcoma translocation breakpoint protein. In some embodiments, the TAA is SART3. In some embodiments, the TAA is SLC34A2. In some embodiments, the TAA is SLC39A6. In some embodiments, the TAA is sLe. In some embodiments, the TAA is SLITRK6. In some embodiments, the TAA is sperm protein 17. In some embodiments, the TAA is SSEA-4. In some embodiments, the TAA is SSX2. In some embodiments, the TAA is TAAG72. In some embodiments, the TAA is TAARP. In some embodiments, the TAA is TACSTD2. In some embodiments, the TAA is TEM1/CD248. In some embodiments, the TAA is TEM7R. In some embodiments, the TAA is TGS5. In some embodiments, the TAA is Tie 2. In some embodiments, the TAA is Tn Ag. In some embodiments, the TAA is TSHR. In some embodiments, the TAA is tyrosinase. In some embodiments, the TAA is UPK2. In some embodiments, the TAA is VEGFR2. In some embodiments, the TAA is WT1. In some embodiments, the TAA is XAGE1.

[0398] A TAA ABM can comprise, for example, a ligand- or an antibody-based moiety. For example, in the case of BCMA as a TAA, the ABM can be APRIL, the BCMA ligand, or a portion thereof that binds BCMA, or an anti-BCMA antibody or an antigen-binding fragment thereof. Ligands and antibodies that bind to TAAs are well-known in the art. In the case of antibody-based moieties, the anti-TAA antibody or antigen-binding fragment can comprise, for example, the CDR sequences of an antibody set forth in Table 11. In some embodiments, the anti-TAA antibody or antigen-binding domain thereof has the heavy and light chain variable region sequences of an antibody set forth in Table 11.

TABLE 11
Exemplary Anti-Tumor-Associated Antigen Antibodies

| Target | Examples of Antibody Name and/or Reference(s) and/or Source |
|---|---|
| ALK | antibodies described in e.g., Mino-Kenudson et al., 2010, Clin Cancer Res |
| | 16(5): 1561-1571 |
| B7H3 | MGA271 (Macrogenics) |
| BCMA | Any BCMA antibody described in WO2012163805, WO200112812, or |
| | WO2003062401. |
| CAIX | Antibody clone 303123 (R&D Systems) |
| CD123 | US8,852,551; EP2426148; WO2014138819; WO2016028896; WO2014130635 |
| CD171 | Hong et al., 2014, J Immunother 37(2): 93-104. |
| CD19 | WO2014031687; WO2012079000; WO2014153270; U.S. Pat. No. 7,741,465; the |
| | CD19 binder of Yescarta or Blinatumomab |
| CD20 | Rituximab, Ofatumumab, Ocrelizumab, Veltuzumab, or GA101 |
| CD22 | Haso et al., 2013, Blood, 121(7): 1165-1174; Wayne et al., 2010, Clin Cancer Res |
| | 16(6): 1894-1903; Kato et al., 2013, Leuk Res 37(1): 83-88; Creative BioMart |
| | (creativebiomart.net): MOM-18047-S(P). |
| CD24 | Maliar et al., Gastroenterology 143(5): 1375-1384 (2012) |
| CD30 | Any CD30 antibody described in US7090843 B1, or EP0805871 |
| CD33 | Bross et al., 2001, Clin Cancer Res 7(6): 1490-1496 (Gemtuzumab Ozogamicin, |
| | hP67.6), Caron et al., 1992, Cancer Res 52(24): 6761-6767 (Lintuzumab, HuM195), |
| | Lapusan et al., 2012, Invest New Drugs 30(3): 1121-1131 (AVE9633), Aigner et al., |
| | 2013, Leukemia 27(5): 1107-1115 (AMG330, CD33 BiTE), Dutour et al., 2012, Adv |
| | Hematol 2012: 683065, or Pizzitola et al., 2014, Leukemia |
| | doi: 10.1038/Lue.2014.62. |
| CD38 | Daratumumab (see, e.g., Groen et al., 2010, Blood 116(21): 1261-1262; MOR202 |
| | (see, e.g., U.S. Pat. No. 8,263,746); or any CD38 antibody described in U.S. |
| | Pat. No. 8,362,211. |
| CD44v6 | Casucci et al., 2013, Blood 122(20): 3461-3472. |
| CD97 | antibodies described in, e.g., U.S. Pat. No. 6,846,911; de Groot et al., 2009, |
| | J Immunol 183(6): 4127-4134; antibody from R&D: MAB373 |
| CEA | Chmielewski et al., 2012, Gastoenterology 143(4): 1095-1107. |
| CLDN6 | WO2015069794; IMAB027, mAb, Ganymed Pharmaceuticals |
| CLL-1 | PE-CLL1-hu Cat #353604 (BioLegend); and PE-CLL1 (CLEC12A) Cat #562566 |
| | (BD); WO 2014/051433 A1; U.S. 2016/0368994 A1; U.S. 2013/0295118 A1; |
| | U.S. Pat. No. 8,536,310 B2; Lu et al., 2014, Angewandte Chemie International |
| | Edition 53(37): 9841-9845; Leong et al., 2017, Blood 129(5): 609-618 |
| CS1 | Elotuzumab (BMS), see e.g., Tai et al., 2008, Blood 112(4): 1329-37; Tai et al., |
| | 2007, Blood. 110(5): 1656-63. |
| EGFR | Cetuximab, panitumumab, zalutumumab, nimotuzumab, or matuzumab |
| EGFRvIII | WO2012138475; WO2014130657 |
| EPCAM | MT110, EpCAM-CD3 bispecific Ab (see, e.g., clinicaltrials.gov/ct2/show/ |
| | NCT00635596); Edrecolomab; 3622W94; ING-1; or adecatumumab (MT201). |
| EphA2 | Yu et al., 2014, Mol Ther 22(1): 102-111. |
| Ephrin B2 | Abengozar et al., 2012, Blood 119(19): 4565-4576. |
| ERBB2 | Trastuzumab or pertuzumab. |
| (Her2/neu) | |
| FAP | Ostermann et al., 2008, Clinical Cancer Research 14: 4584-4592 (FAP5), U.S. Pat. |
| | Publication No. 2009/0304718; sibrotuzumab (see e.g., Hofheinz et al., 2003, |
| | Oncology Research and Treatment 26(1): 44-48); and Tran et al., 2013, J Exp Med |
| | 210(6): 1125-1135. |
| FLT3 | Any FLT3 antibody described in WO2011076922, U.S. Pat. No. 5777084, |
| | EP0754230, or US20090297529. |
| Folate | IMGN853, or any folate receptor alpha antibody described in US20120009181; U.S. |
| receptor | Pat. No. 4851332, LK26: U.S. Pat No. 5952484. |
| alpha | |
| Folate | antibodies described in, e.g., US20100297138 ; WO2007/067992 |
| receptor | |
| beta | |
| GD2 | Mujoo et al., Cancer Res. 47(4): 1098-1104 (1987); Cheung et al., Cancer Res |
| | 45(6): 2642-2649 (1985), Cheung et al., J Clin Oncol 5(9): 1430-1440 (1987), |
| | Cheung et al., J Clin Oncol 16(9): 3053-3060 (1998), Handgretinger et al., Cancer |
| | Immunol Immunother 35(3): 199-204 (1992); |
| | mAb 14.18, 14G2a, ch14.18, hu14.18, 3F8, hu3F8, 3G6, 8B6, 60C3, 10B8, |
| | ME36.1, or 8H9 (see e.g., WO2012033885, WO2013040371, WO2013192294, |
| | WO2013061273, WO2013123061, WO2013074916, and WO201385552). |
| | Any GD2 antibody described in U.S. Publication No.: 20100150910 or PCT |
| | Publication No.: WO2011160119. |
| GD3 | Any GD3 antibody described in U.S. Pat. No. 7253263; U.S. Pat. No. 8,207,308; |
| | U.S. 20120276046; EP1013761; WO2005035577; or U.S. Pat. No. 6437098. |
| GloboH | VK9; Kudryashov et al., 1998, Glycoconj J. 15(3): 243-9; Lou et al., 2014, Proc Natl |
| | Acad Sci U.S.A 111(7): 2482-2487; MBr1: Bremer et al., 1984, J Biol Chem |
| | 259: 14773-14777. |
| gp100 | HMB45, NKIbetaB, or any anti-gp100 antibody described in WO2013165940, or |
| | US20130295007 |
| GPRC5D | R&Dsystems: FAB6300A; Lifespan Biosciences: LS-A4180 |
| HMWMAA | antibodies described in, e.g., Kmiecik et al., 2014, Oncoimmunology 3(1): e27185 |
| | (PMID: 24575382) (mAb9.2.27); U.S. Pat. No. 6528481; WO2010033866; U.S. |
| | 20140004124 |
| IGF-I | Any IGF-I receptor antibody described in US8344112 B2; EP2322550 A1; WO |
| receptor | 2006/138315, or PCT/U52006/022995. |
| IL-11Ra | Abcam (cat #ab55262) or Novus Biologicals (cat #EPR5446) |
| IL-13Ra2 | Any IL-13Ra2 antibody described in WO2008/146911, WO2004087758, or |
| | WO2004087758 |
| KIT | Any KIT antibody described in US7915391, US20120288506 |
| KLRG2 | ab121563 (Abcam); B-12 or sc-514346 (Santa Cruz); HPA018199 (Sigma Aldrich) |
| LewisY | Kelly et al., Cancer Biother Radiopharm 23(4): 411-423 (2008) (hu3S193 Ab |
| | (scFvs)); Dolezal et al., Protein Engineering 16(1): 47-56 (2003) (NC10 scFv) |
| LMP2 | Any LMP2 antibody described in U.S. 7,410,640 or U.S. 2005/0129701 |
| LRP6 | WO2009064944, WO2009056634, WO2011119661, WO2011138392, |
| | WO2011138391, WO2013067355, WO2014029752, WO2017093478 |
| Mesothelin | Any mesothelin antibody described in U.S. 20110262448, U.S. 2012/0107933 or |
| | U.S. 9,719,996 |
| MUC1 | SAR566658 |
| NCAM | 2-2B: MAB5324 (EMD Millipore) |
| NY-BR-1 | antibodies described in, e.g., Jager et al., 2007, Appl lmmunohitochem Mol |
| | Morphol 15(1): 77-83 |
| o-acetyl- | 8B6 |
| GD2 | |
| PDGFR- | Abcam ab32570 |
| beta | |
| PLAC1 | antibodies described in, e.g., Ghods et al., 2013, Biotechnol Appl Biochem |
| | doi: 10.1002/bab.1177 |
| Polysialic | antibodies described in e.g., Nagae et al., 2013, J Biol Chem 288(47): 33784- |
| acid | 33796 |
| PRSS21 | Any PRSS21 antibody described in U.S. Pat. No.: 8,080,650. |
| PSCA | Morgenroth et al., Prostate 67(10): 1121-1131 (2007) (scFv 7F5); Nejatollahi et al., |
| | J of Oncology 2013(2013), article ID 839831 (scFv C5-II); or any PSCA antibody |
| | described in U.S. Pat Publication No. 20090311181. |
| PSMA | Parker et al., Protein Expr Purif 89(2): 136-145 (2013), U.S. 20110268656 (J591 |
| | ScFv); Frigerio et al, European J Cancer 49(9): 2223-2232 (2013) (scFvD2B); WO |
| | 2006125481 (mAbs 3/A12, 3/E7 and 3/F11) or single chain antibody fragments |
| | (scFv A5 and D7). |
| ROR1 | Hudecek et al., Olin Cancer Res 19(12): 3153-3164 (2013); or any ROR1 antibody |
| | described in WO 2011159847 or US20130101607. |
| SSEA-4 | MC813 (Cell Signaling) |
| TAG72 | Hombach et al., Gastroenterology 113(4): 1163-1170 (1997) or Abcam ab691. |
| TEM1/ | antibodies described in, e.g., Marty et al., 2006, Cancer Lett 235(2): 298-308; Zhao |
| CD248 | et al., 2011, J Immunol Methods 363(2): 221-232 |
| Tn | Brooks et al., PNAS 107(22): 10056-10061 (2010); Stone et al., Oncolmmunology |
| | 1(6): 863-873(2012); any Tn antibody described in US8,440,798 |
| TSHR | antibodies described in, e.g., Marty et al., 2006, Cancer Lett 235(2): 298-308; Zhao |
| | et al., 2011, J Immunol Methods 363(2): 221-232 |
| Tyrosinase | Any tyrosinase antibody described in U.S. Pat. No. 5843674 or US19950504048. |
| VEGFR2 | Chinnasamy et al., J Clin Invest 120(11): 3953-3968 (2010). |

[0399] 6.7.1. BCMA

[0400] In certain aspects, the present disclosure provides a TBM in which ABM3 BCMA is a tumor necrosis family receptor (TNFR) member expressed on cells of the B-cell lineage. BCMA expression is the highest on terminally differentiated B cells that assume the long lived plasma cell fate, including plasma cells, plasmablasts and a subpopulation of activated B cells and memory B cells. BCMA is involved in mediating the survival of plasma cells for maintaining long-term humoral immunity. The expression of BCMA has been recently linked to a number of cancers, autoimmune disorders, and infectious diseases. Cancers with increased expression of BCMA include some hematological cancers, such as multiple myeloma, Hodgkin's and non-Hodgkin's lymphoma, various leukemias, and glioblastoma.

[0401] TBMs comprising a ABM that binds to BCMA can comprise, for example, an anti-BCMA antibody or an antigen-binding domain thereof. The anti-BCMA antibody or antigen-binding domain thereof can comprise, for example, CDR, VH, VL, or scFV sequences set forth in Tables 12A-12G.

TABLE 12A
BCMA Binders - Variable domain and
scFv sequences

| | | | SEQ |
|---|---|---|---|
| Anti- | Do- | | ID |
| body | main | Sequence | NO. |
| BCMA- | VH | EVQLVESGGGLVQPGGSLRLSCAVSGFALSNHGMS | 263 |
| 1 | | WVRRAPGKGLEWVSGIVYSGSTYYAASVKGRFTIS | |
| | | RDNSRNTLYLQMNSLRPEDTAIYYCSAHGGESDVW | |
| | | GQGTTVTVSS | |
| | VL | DIQLTQSPSSLSASVGDRVTITCRASQSISSYLNW | 264 |
| | | YQQKPGKAPKLLIYAASSLQSGVPSRFSGSGSGTD | |
| | | FTLTISSLQPEDFATYYCQQSYSTPYTFGQGTKVE | |
| | | IK | |
| | scFv | EVQLVESGGGLVQPGGSLRLSCAVSGFALSNHGMS | 265 |
| | | WVRRAPGKGLEWVSGIVYSGSTYYAASVKGRFTIS | |
| | | RDNSRNTLYLQMNSLRPEDTAIYYCSAHGGESDVW | |
| | | GQGTTVTVSSASGGGGSGGRASGGGGSDIQLTQSP | |
| | | SSLSASVGDRVTITCRASQSISSYLNWYQQKPGKA | |
| | | PKLLIYAASSLQSGVPSRFSGSGSGTDFTLTISSL | |
| | | QPEDFATYYCQQSYSTPYTFGQGTKVEIK | |
| BCMA- | VH | QVQLVESGGGLVQPGRSLRLSCAASGFTFSNYAMS | 266 |
| 2 | | WVRQAPGKGLGWVSGISRSGENTYYADSVKGRFTI | |
| | | SRDNSKNTLYLQMNSLRDEDTAVYYCARSPAHYYG | |
| | | GMDVWGQGTTVTVSS | |
| | VL | DIVLTQSPGTLSLSPGERATLSCRASQSISSSFLA | 267 |
| | | WYQQKPGQAPRLLIYGASRRATGIPDRFSGSGSGT | |
| | | DFTLTISRLEPEDSAVYYCQQYHSSPSWTFGQGTK | |
| | | LEIK | |
| | scFv | QVQLVESGGGLVQPGRSLRLSCAASGFTFSNYAMS | 268 |
| | | WVRQAPGKGLGWVSGISRSGENTYYADSVKGRFTI | |
| | | SRDNSKNTLYLQMNSLRDEDTAVYYCARSPAHYYG | |
| | | GMDVWGQGTTVTVSSASGGGGSGGRASGGGGSDIV | |
| | | LTQSPGTLSLSPGERATLSCRASQSISSSFLAWYQ | |
| | | QKPGQAPRLLIYGASRRATGIPDRFSGSGSGTDFT | |
| | | LTISRLEPEDSAVYYCQQYHSSPSWTFGQGTKLEI | |
| | | K | |
| BCMA- | VH | QVQLVESGGGLVQPGRSLRLSCAASGFTFDDYAMH | 269 |
| 3 | | WVRQAPGKGLEWVSGISWNSGSIGYADSVKGRFTI | |
| | | SRDNAKNSLYLQMNSLRAEDTALYYCSVHSFLAYW | |
| | | GQGTLVTVSS | |
| | VL | DIVMTQTPLSLPVTPGEPASISCRSSQSLLHSNGY | 270 |
| | | NYLDWYLQKPGQSPQLLIYLGSNRASGVPDRFSGS | |
| | | GSGTDFTLKISRVEAEDVGVYYCMQALQTPYTFGQ | |
| | | GTKVEIK | |
| | scFv | QVQLVESGGGLVQPGRSLRLSCAASGFTFDDYAMH | 271 |
| | | WVRQAPGKGLEWVSGISWNSGSIGYADSVKGRFTI | |
| | | SRDNAKNSLYLQMNSLRAEDTALYYCSVHSFLAYW | |
| | | GQGTLVTVSSASGGGGSGGRASGGGGSDIVMTQTP | |
| | | LSLPVTPGEPASISCRSSQSLLHSNGYNYLDWYLQ | |
| | | KPGQSPQLLIYLGSNRASGVPDRFSGSGSGTDFTL | |
| | | KISRVEAEDVGVYYCMQALQTPYTFGQGTKVEIK | |
| BCMA- | VH | EVQLLESGGGLVQPGGSLRLSCAVSGFALSNHGMS | 272 |
| 4 | | WVRRAPGKGLEWVSGIVYSGSTYYAASVKGRFTIS | |
| | | RDNSRNTLYLQMNSLRPEDTAIYYCSAHGGESDVW | |
| | | GQGTTVTVSS | |
| | VL | DIVMTQTPLSLSVTPGQPASISCKSSQSLLRNDGK | 273 |
| | | TPLYWYLQKAGQPPQLLIYEVSNRFSGVPDRFSGS | |
| | | GSGTDFTLKISRVEAEDVGAYYCMQNIQFPSFGGG | |
| | | TKLEIK | |
| | scFv | EVQLLESGGGLVQPGGSLRLSCAVSGFALSNHGMS | 274 |
| | | WVRRAPGKGLEWVSGIVYSGSTYYAASVKGRFTIS | |
| | | RDNSRNTLYLQMNSLRPEDTAIYYCSAHGGESDVW | |
| | | GQGTTVTVSSASGGGGSGGRASGGGGSDIVMTQTP | |
| | | LSLSVTPGQPASISCKSSQSLLRNDGKTPLYWYLQ | |
| | | KAGQPPQLLIYEVSNRFSGVPDRFSGSGSGTDFTL | |
| | | KISRVEAEDVGAYYCMQNIQFPSFGGGTKLEIK | |
| BCMA- | VH | QVQLVQSGAEVRKTGASVKVSCKASGYIFDNFGIN | 275 |
| 5 | | WVRQAPGQGLEWMGWINPKNNNTNYAQKFQGRVTI | |
| | | TADESTNTAYMEVSSLRSEDTAVYYCARGPYYYQS | |
| | | YMDVWGQGTMVTVSS | |
| | VL | DIVMTQTPLSLPVTPGEPASISCRSSQSLLHSNGY | 276 |
| | | NYLNWYLQKPGQSPQLLIYLGSKRASGVPDRFSGS | |
| | | GSGTDFTLHITRVGAEDVGVYYCMQALQTPYTFGQ | |
| | | GTKLEIK | |
| | scFv | QVQLVQSGAEVRKTGASVKVSCKASGYIFDNFGIN | 277 |
| | | WVRQAPGQGLEWMGWINPKNNNTNYAQKFQGRVTI | |
| | | TADESTNTAYMEVSSLRSEDTAVYYCARGPYYYQS | |
| | | YMDVWGQGTMVTVSSASGGGGSGGRASGGGGSDIV | |
| | | MTQTPLSLPVTPGEPASISCRSSQSLLHSNGYNYL | |
| | | NWYLQKPGQSPQLLIYLGSKRASGVPDRFSGSGSG | |
| | | TDFTLHITRVGAEDVGVYYCMQALQTPYTFGQGTK | |
| | | LEIK | |
| BCMA- | VH | QVQLQESGGGLVQPGGSLRLSCAASGFTFSSDAMT | 278 |
| 6 | | WVRQAPGKGLEQVSVISGSGGTTYYADSVKGRFTI | |
| | | SRDNSKNTLYLQMNSLRAEDTAVYYCAKLDSSGYY | |
| | | YARGPRYWGQGTLVTVSS | |
| | VL | DIQLTQSPSSLSASVGDRVTITCRASQSISSYLNW | 279 |
| | | YQQKPGKAPKLLIYGASTLASGVPARFSGSGSGTH | |
| | | FTLTINSLQSEDSATYYCQQSYKRASFGQGTKVEI | |
| | | K | |
| | scFv | QVQLQESGGGLVQPGGSLRLSCAASGFTFSSDAMT | 280 |
| | | WVRQAPGKGLEWVSVISGSGGTTYYADSVKGRFTI | |
| | | SRDNSKNTLYLQMNSLRAEDTAVYYCAKLDSSGYY | |
| | | YARGPRYWGQGTLVTVSSASGGGGSGGRASGGGGS | |
| | | DIQLTQSPSSLSASVGDRVTITCRASQSISSYLNW | |
| | | YQQKPGKAPKLLIYGASTLASGVPARFSGSGSGTH | |
| | | FTLTINSLQSEDSATYYCQQSYKRASFGQGTKVEI | |
| | | K | |
| BCMA- | VH | QVQLVQSGAEVKKPGASVKVSCKASGYTFSNYGIT | 281 |
| 7 | | WVRQAPGQGLEWMGWISAYNGNTNYAQKFQGRVTM | |
| | | TRNTSISTAYMELSSLRSEDTAVYYCARGPYYYYM | |
| | | DVWGKGTMVTVSS | |
| | VL | EIVMTQSPLSLPVTPGEPASISCRSSQSLLYSNGY | 282 |
| | | NYVDWYLQKPGQSPQLLIYLGSNRASGVPDRFSGS | |
| | | GSGTDFKLQISRVEAEDVGIYYCMQGRQFPYSFGQ | |
| | | GTKVEIK | |
| | scFv | QVQLVQSGAEVKKPGASVKVSCKASGYTFSNYGIT | 283 |
| | | WVRQAPGQGLEWMGWISAYNGNTNYAQKFQGRVTM | |
| | | TRNTSISTAYMELSSLRSEDTAVYYCARGPYYYYM | |
| | | DVWGKGTMVTVSSASGGGGSGGRASGGGGSEIVMT | |
| | | QSPLSLPVTPGEPASISCRSSQSLLYSNGYNYVDW | |
| | | YLQKPGQSPQLLIYLGSNRASGVPDRFSGSGSGTD | |
| | | FKLQISRVEAEDVGIYYCMQGRQFPYSFGQGTKVE | |
| | | IK | |
| BCMA- | VH | EVQLLETGGGLVQPGGSLRLSCAVSGFALSNHGMS | 284 |
| 8 | | WVRRAPGKGLEWVSGIVYSGSTYYAASVKGRFTIS | |
| | | RDNSRNTLYLQMNSLRPEDTAIYYCSAHGGESDVW | |
| | | GQGTTVTVSS | |
| | VL | EIVLTQSPATLSVSPGESATLSCRASQSVSSNLAW | 285 |
| | | YQQKPGQAPRLLIYGASTRASGIPDRFSGSGSGTD | |
| | | FTLTISSLQAEDVAVYYCQQYGSSLTFGGGTKVEI | |
| | | K | |
| | scFv | EVQLLETGGGLVQPGGSLRLSCAVSGFALSNHGMS | 286 |
| | | WVRRAPGKGLEWVSGIVYSGSTYYAASVKGRFTIS | |
| | | RDNSRNTLYLQMNSLRPEDTAIYYCSAHGGESDVW | |
| | | GQGTTVTVSSASGGGGSGGRASGGGGSEIVLTQSP | |
| | | ATLSVSPGESATLSCRASQSVSSNLAWYQQKPGQA | |
| | | PRLLIYGASTRASGIPDRFSGSGSGTDFTLTISSL | |
| | | QAEDVAVYYCQQYGSSLTFGGGTKVEIK | |
| BCMA- | VH | EVQLVETGGGLVQPGGSLRLSCAVSGFALSNHGMS | 287 |
| 9 | | WVRRAPGKGLEWVSGIVYSGSTYYAASVKGRFTIS | |
| | | RDNSRNTLYLQMNSLRPEDTAIYYCSAHGGESDVW | |
| | | GQGTTVTVSS | |
| | VL | EIVMTQSPATLSVSPGERATLSCRASQSVSSKLAW | 288 |
| | | YQQKPGQAPRLLMYGASIRATGIPDRFSGSGSGTE | |
| | | FTLTISSLEPEDFAVYYCQQYGSSSWTFGQGTKVE | |
| | | IK | |
| | scFv | EVQLVETGGGLVQPGGSLRLSCAVSGFALSNHGMS | 289 |
| | | WVRRAPGKGLEWVSGIVYSGSTYYAASVKGRFTIS | |
| | | RDNSRNTLYLQMNSLRPEDTAIYYCSAHGGESDVW | |
| | | GQGTTVTVSSASGGGGSGGRASGGGGSEIVMTQSP | |
| | | ATLSVSPGERATLSCRASQSVSSKLAWYQQKPGQA | |
| | | PRLLMYGASIRATGIPDRFSGSGSGTEFTLTISSL | |
| | | EPEDFAVYYCQQYGSSSWTFGQGTKVEIK | |
| BCMA- | VH | EVQLVETGGGVVQPGGSLRLSCAVSGFALSNHGMS | 290 |
| 10 | | WVRRAPGKGLEWVSGIVYSGSTYYAASVKGRFTIS | |
| | | RDNSRNTLYLQMNSLRPEDTAIYYCSAHGGESDVW | |
| | | GQGTTVTVSS | |
| | VL | EIVLTQSPGTLSLSPGERATLSCRASQSVGSTNLA | 291 |
| | | WYQQKPGQAPRLLIYDASNRATGIPDRFSGGGSGT | |
| | | DFTLTISRLEPEDFAVYYCQQYGSSPPWTFGQGTK | |
| | | VEIK | |
| | scFv | EVQLVETGGGVVQPGGSLRLSCAVSGFALSNHGMS | 292 |
| | | WVRRAPGKGLEWVSGIVYSGSTYYAASVKGRFTIS | |
| | | RDNSRNTLYLQMNSLRPEDTAIYYCSAHGGESDVW | |
| | | GQGTTVTVSSASGGGGSGGRASGGGGSEIVLTQSP | |
| | | GTLSLSPGERATLSCRASQSVGSTNLAWYQQKPGQ | |
| | | APRLLIYDASNRATGIPDRFSGGGSGTDFTLTISR | |
| | | LEPEDFAVYYCQQYGSSPPWTFGQGTKVEIK | |
| BCMA- | VH | QVQLVESGGGLVKPGGSLRLSCAASGFTFSDYYMS | 293 |
| 11 | | WIRQAPGKGLEWVSYISSSGSTIYYADSVKGRFTI | |
| | | SRDNAKNSLYLQMNSLRAEDTAVYYCARESGDGMD | |
| | | VWGQGTTVTVSS | |
| | VL | DIQMTQSPSSLSASVGDRVTITCRASQSISSYLNW | 294 |
| | | YQQKPGKAPKLLIYAASSLQSGVPSRFSGSGSGTD | |
| | | FTLTISSLQPEDFATYYCQQSYTLAFGQGTKVDIK | |
| | scFv | QVQLVESGGGLVKPGGSLRLSCAASGFTFSDYYMS | 295 |
| | | WIRQAPGKGLEWVSYISSSGSTIYYADSVKGRFTI | |
| | | SRDNAKNSLYLQMNSLRAEDTAVYYCARESGDGMD | |
| | | VWGQGTTVTVSSASGGGGSGGRASGGGGSDIQMTQ | |
| | | SPSSLSASVGDRVTITCRASQSISSYLNWYQQKPG | |
| | | KAPKLLIYAASSLQSGVPSRFSGSGSGTDFTLTIS | |
| | | SLQPEDFATYYCQQSYTLAFGQGTKVDIK | |
| BCMA- | VH | QVQLVQSGGGLVKPGGSLRLSCAASGFTFSDYYMS | 296 |
| 12 | | WIRQAPGKGLEWVSYISSSGNTIYYADSVKGRFTI | |
| | | SRDNAKNSLYLQMNSLRAEDTAVYYCARSTMVRED | |
| | | YWGQGTLVTVSS | |
| | VL | DIVLTQSPLSLPVTLGQPASISCKSSESLVHNSGK | 297 |
| | | TYLNWFHQRPGQSPRRLIYEVSNRDSGVPDRFTGS | |
| | | GSGTDFTLKISRVEAEDVGVYYCMQGTHWPGTFGQ | |
| | | GTKLEIK | |
| | scFv | QVQLVQSGGGLVKPGGSLRLSCAASGFTFSDYYMS | 298 |
| | | WIRQAPGKGLEWVSYISSSGNTIYYADSVKGRFTI | |
| | | SRDNAKNSLYLQMNSLRAEDTAVYYCARSTMVRED | |
| | | YWGQGTLVTVSSASGGGGSGGRASGGGGSDIVLTQ | |
| | | SPLSLPVTLGQPASISCKSSESLVHNSGKTYLNWF | |
| | | HQRPGQSPRRLIYEVSNRDSGVPDRFTGSGSGTDF | |
| | | TLKISRVEAEDVGVYYCMQGTHWPGTFGQGTKLEI | |
| | | K | |
| BCMA- | VH | QVQLVESGGGLVQPGGSLRLSCAVSGFALSNHGMS | 299 |
| 13 | | WVRRAPGKGLEWVSGIVYSGSTYYAASVKGRFTIS | |
| | | RDNSRNTLYLQMNSLRPEDTAIYYCSAHGGESDVW | |
| | | GQGTTVTVSS | |
| | VL | DIRLTQSPSPLSASVGDRVTITCQASEDINKFLNW | 300 |
| | | YHQTPGKAPKLLIYDASTLQTGVPSRFSGSGSGTD | |
| | | FTLTINSLQPEDIGTYYCQQYESLPLTFGGGTKVE | |
| | | IK | |
| | scFv | QVQLVESGGGLVQPGGSLRLSCAVSGFALSNHGMS | 301 |
| | | WVRRAPGKGLEWVSGIVYSGSTYYAASVKGRFTIS | |
| | | RDNSRNTLYLQMNSLRPEDTAIYYCSAHGGESDVW | |
| | | GQGTTVTVSSASGGGGSGGRASGGGGSDIRLTQSP | |
| | | SPLSASVGDRVTITCQASEDINKFLNWYHQTPGKA | |
| | | PKLLIYDASTLQTGVPSRFSGSGSGTDFTLTINSL | |
| | | QPEDIGTYYCQQYESLPLTFGGGTKVEIK | |
| BCMA- | VH | EVQLVETGGGLVQPGGSLRLSCAVSGFALSNHGMS | 287 |
| 14 | | WVRRAPGKGLEWVSGIVYSGSTYYAASVKGRFTIS | |
| | | RDNSRNTLYLQMNSLRPEDTAIYYCSAHGGESDVW | |
| | | GQGTTVTVSS | |
| | VL | ETTLTQSPATLSVSPGERATLSCRASQSVGSNLAW | 302 |
| | | YQQKPGQGPRLLIYGASTRATGIPARFSGSGSGTE | |
| | | FTLTISSLQPEDFAVYYCQQYNDWLPVTFGQGTKV | |
| | | EIK | |
| | scFv | EVQLVETGGGLVQPGGSLRLSCAVSGFALSNHGMS | 303 |
| | | WVRRAPGKGLEWVSGIVYSGSTYYAASVKGRFTIS | |
| | | RDNSRNTLYLQMNSLRPEDTAIYYCSAHGGESDVW | |
| | | GQGTTVTVSSASGGGGSGGRASGGGGSETTLTQSP | |
| | | ATLSVSPGERATLSCRASQSVGSNLAWYQQKPGQG | |
| | | PRLLIYGASTRATGIPARFSGSGSGTEFTLTISSL | |
| | | QPEDFAVYYCQQYNDWLPVTFGQGTKVEIK | |
| BCMA- | VH | EVQLVESGGGLVQPGGSLRLSCAVSGFALSNHGMS | 263 |
| 15 | | WVRRAPGKGLEWVSGIVYSGSTYYAASVKGRFTIS | |
| | | RDNSRNTLYLQMNSLRPEDTAIYYCSAHGGESDVW | |
| | | GQGTTVTVSS | |
| | VL | EIVLTQSPGTLSLSPGERATLSCRASQSIGSSSLA | 304 |
| | | WYQQKPGQAPRLLMYGASSRASGIPDRFSGSGSGT | |
| | | DFTLTISRLEPEDFAVYYCQQYAGSPPFTFGQGTK | |
| | | VEIK | |
| | scFv | EVQLVESGGGLVQPGGSLRLSCAVSGFALSNHGMS | 305 |
| | | WVRRAPGKGLEWVSGIVYSGSTYYAASVKGRFTIS | |
| | | RDNSRNTLYLQMNSLRPEDTAIYYCSAHGGESDVW | |
| | | GQGTTVTVSSASGGGGSGGRASGGGGSEIVLTQSP | |
| | | GTLSLSPGERATLSCRASQSIGSSSLAWYQQKPGQ | |
| | | APRLLMYGASSRASGIPDRFSGSGSGTDFTLTISR | |
| | | LEPEDFAVYYCQQYAGSPPFTFGQGTKVEIK | |
| BCMA- | VH | QVQLQESGPGLVKPSETLSLTCTVSGGSISSSYYY | 306 |
| 16 | | WGWIRQPPGKGLEWIGSIYYSGSAYYNPSLKSRVT | |
| | | ISVDTSKNQFSLRLSSVTAADTAVYYCARHWQEWP | |
| | | DAFDIWGQGTMVTVSS | |
| | VL | ETTLTQSPAFMSATPGDKVIISCKASQDIDDAMNW | 307 |
| | | YQQKPGEAPLFIIQSATSPVPGIPPRFSGSGFGTD | |
| | | FSLTINNIESEDAAYYFCLQHDNFPLTFGQGTKLE | |
| | | IK | |
| | scFv | QVQLQESGPGLVKPSETLSLTCTVSGGSISSSYYY | 308 |
| | | WGWIRQPPGKGLEWIGSIYYSGSAYYNPSLKSRVT | |
| | | ISVDTSKNQFSLRLSSVTAADTAVYYCARHWQEWP | |
| | | DAFDIWGQGTMVTVSSGGGGSGGGGSGGGGSETTL | |
| | | TQSPAFMSATPGDKVIISCKASQDIDDAMNWYQQK | |
| | | PGEAPLFIIQSATSPVPGIPPRFSGSGFGTDFSLT | |
| | | INNIESEDAAYYFCLQHDNFPLTFGQGTKLEIK | |
| BCMA- | VH | QVNLRESGPALVKPTQTLTLTCTFSGFSLRTSGMC | 309 |
| 17 | | VSWIRQPPGKALEWLARIDWDEDKFYSTSLKTRLT | |
| | | ISKDTSDNQVVLRMTNMDPADTATYYCARSGAGGT | |
| | | SATAFDIWGPGTMVTVSS | |
| | VL | DIQMTQSPSSLSASVGDRVTITCRASQDIYNNLAW | 310 |
| | | FQLKPGSAPRSLMYAANKSQSGVPSRFSGSASGTD | |
| | | FTLTISSLQPEDFATYYCQHYYRFPYSFGQGTKLE | |
| | | IK | |
| | scFv | VNLRESGPALVKPTQTLTLTCTFSGFSLRTSGMCV | 311 |
| | | SWIRQPPGKALEWLARIDWDEDKFYSTSLKTRLTI | |
| | | SKDTSDNQVVLRMTNMDPADTATYYCARSGAGGTS | |
| | | ATAFDIWGPGTMVTVSSGGGGSGGGGSGGGGSDIQ | |
| | | MTQSPSSLSASVGDRVTITCRASQDIYNNLAWFQL | |
| | | KPGSAPRSLMYAANKSQSGVPSRFSGSASGTDFTL | |
| | | TISSLQPEDFATYYCQHYYRFPYSFGQGTKLEIK | |
| BCMA- | VH | EVQLVESGGGLVKPGGSLRLSCAASGFTFSSYSMN | 312 |
| 18 | | WVRQAPGKGLEWVSSISSSSSYIYYADSVKGRFTI | |
| | | SRDNAKNSLYLQMNSLRAEDTAVYYCAKTIAAVYA | |
| | | FDIWGQGTTVTVSS | |
| | VL | EIVLTQSPLSLPVTPEEPASISCRSSQSLLHSNGY | 313 |
| | | NYLDWYLQKPGQSPQLLIYLGSNRASGVPDRFSGS | |
| | | GSGTDFTLKISRVEAEDVGVYYCMQALQTPYTFGQ | |
| | | GTKLEIK | |
| | scFv | EVQLVESGGGLVKPGGSLRLSCAASGFTFSSYSMN | 314 |
| | | WVRQAPGKGLEWVSSISSSSSYIYYADSVKGRFTI | |
| | | SRDNAKNSLYLQMNSLRAEDTAVYYCAKTIAAVYA | |
| | | FDIWGQGTTVTVSSGGGGSGGGGSGGGGSEIVLTQ | |
| | | SPLSLPVTPEEPASISCRSSQSLLHSNGYNYLDWY | |
| | | LQKPGQSPQLLIYLGSNRASGVPDRFSGSGSGTDF | |
| | | TLKISRVEAEDVGVYYCMQALQTPYTFGQGTKLEI | |
| | | K | |
| BCMA- | VH | EVQLVESGGGLVKPGGSLRLSCAASGFTFSDYYMS | 315 |
| 19 | | WIRQAPGKGLEWVSYISSSGSTIYYADSVKGRFTI | |
| | | SRDNAKNSLYLQMNSLRAEDTAVYYCARDLRGAFD | |
| | | IWGQGTMVTVSS | |
| | VL | SYVLTQSPSVSAAPGYTATISCGGNNIGTKSVHWY | 316 |
| | | QQKPGQAPLLVIRDDSVRPSKIPGRFSGSNSGNMA | |
| | | TLTISGVQAGDEADFYCQVWDSDSEHVVFGGGTKL | |
| | | TVL | |
| | scFv | EVQLVESGGGLVKPGGSLRLSCAASGFTFSDYYMS | 317 |
| | | WIRQAPGKGLEWVSYISSSGSTIYYADSVKGRFTI | |
| | | SRDNAKNSLYLQMNSLRAEDTAVYYCARDLRGAFD | |
| | | IWGQGTMVTVSSGGGGSGGGGSGGGGSSYVLTQSP | |
| | | SVSAAPGYTATISCGGNNIGTKSVHWYQQKPGQAP | |
| | | LLVIRDDSVRPSKIPGRFSGSNSGNMATLTISGVQ | |
| | | AGDEADFYCQVWDSDSEHVVFGGGTKLTVL | |
| BCMA- | VH | QVQLVQSGAEVKKPGASVKVSCKPSGYTVTSHYIH | 318 |
| 20 | | WVRRAPGQGLEWMGMINPSGGVTAYSQTLQGRVTM | |
| | | TSDTSSSTVYMELSSLRSEDTAMYYCAREGSGSGW | |
| | | YFDFWGRGTLVTVSS | |
| | VL | SYVLTQPPSVSVSPGQTASITCSGDGLSKKYVSWY | 319 |
| | | QQKAGQSPVVLISRDKERPSGIPDRFSGSNSADTA | |
| | | TLTISGTQAMDEADYYCQAWDDTTVVFGGGTKLTV | |
| | | L | |
| | scFv | QVQLVQSGAEVKKPGASVKVSCKPSGYTVTSHYIH | 320 |
| | | WVRRAPGQGLEWMGMINPSGGVTAYSQTLQGRVTM | |
| | | TSDTSSSTVYMELSSLRSEDTAMYYCAREGSGSGW | |
| | | YFDFWGRGTLVTVSSGGGGSGGGGSGGGGSSYVLT | |
| | | QPPSVSVSPGQTASITCSGDGLSKKYVSWYQQKAG | |
| | | QSPVVLISRDKERPSGIPDRFSGSNSADTATLTIS | |
| | | GTQAMDEADYYCQAWDDTTVVFGGGTKLTVL | |
| BCMA- | VH | QVQLQESGPGLVKPSQTLSLTCTVSGGSISSGGYY | 321 |
| 21 | | WSWIRQHPGKGLEWIGYIYYSGSTYYNPSLKSRVT | |
| | | ISVDTSKNQFSLKLSSVTAADTAVYYCARAGIAAR | |
| | | LRGAFDIWGQGTMVTVSS | |
| | VL | DIVMTQSPSSVSASVGDRVIITCRASQGIRNWLAW | 322 |
| | | YQQKPGKAPNLLIYAASNLQSGVPSRFSGSGSGAD | |
| | | FTLTISSLQPEDVATYYCQKYNSAPFTFGPGTKVD | |
| | | IK | |
| | scFv | QVQLQESGPGLVKPSQTLSLTCTVSGGSISSGGYY | 323 |
| | | WSWIRQHPGKGLEWIGYIYYSGSTYYNPSLKSRVT | |
| | | ISVDTSKNQFSLKLSSVTAADTAVYYCARAGIAAR | |
| | | LRGAFDIWGQGTMVTVSSGGGGSGGGGSGGGGSDI | |
| | | VMTQSPSSVSASVGDRVIITCRASQGIRNWLAWYQ | |
| | | QKPGKAPNLLIYAASNLQSGVPSRFSGSGSGADFT | |
| | | LTISSLQPEDVATYYCQKYNSAPFTFGPGTKVDIK | |
| BCMA- | VH | QVQLVQSGAEVKKPGSSVKVSCKASGGTFSSYAIS | 324 |
| 22 | | WVRQAPGQGLEWMGGIIPIFGTANYAQKFQGRVTI | |
| | | TADESTSTAYMELSSLRSEDTAVYYCARRGGYQLL | |
| | | RWDVGLLRSAFDIWGQGTMVTVSS | |
| | VL | SYVLTQPPSVSVAPGQTARITCGGNNIGSKSVHWY | 325 |
| | | QQKPGQAPVLVLYGKNNRPSGVPDRFSGSRSGTTA | |
| | | SLTITGAQAEDEADYYCSSRDSSGDHLRVFGTGTK | |
| | | VTVL | |
| | scFv | QVQLVQSGAEVKKPGSSVKVSCKASGGTFSSYAIS | 326 |
| | | WVRQAPGQGLEWMGGIIPIFGTANYAQKFQGRVTI | |
| | | TADESTSTAYMELSSLRSEDTAVYYCARRGGYQLL | |
| | | RWDVGLLRSAFDIWGQGTMVTVSSGGGGSGGGGSG | |
| | | GGGSSYVLTQPPSVSVAPGQTARITCGGNNIGSKS | |
| | | VHWYQQKPGQAPVLVLYGKNNRPSGVPDRFSGSRS | |
| | | GTTASLTITGAQAEDEADYYCSSRDSSGDHLRVFG | |
| | | TGTKVTVL | |
| BCMA- | VH | EVQLQQSGPGLVKPSQTLSLTCAISGDSVSSNSAA | 327 |
| 23 | | WNWIRQSPSRGLEWLGRTYYRSKWYSFYAISLKSR | |
| | | IIINPDTSKNQFSLQLKSVTPEDTAVYYCARSSPE | |
| | | GLFLYWFDPWGQGTLVTVSS | |
| | VL | SSELTQDPAVSVALGQTIRITCQGDSLGNYYATWY | 328 |
| | | QQKPGQAPVLVIYGTNNRPSGIPDRFSASSSGNTA | |
| | | SLTITGAQAEDEADYYCNSRDSSGHHLLFGTGTKV | |
| | | TVL | |
| | ScFv | EVQLQQSGPGLVKPSQTLSLTCAISGDSVSSNSAA | 329 |
| | | WNWIRQSPSRGLEWLGRTYYRSKWYSFYAISLKSR | |
| | | IIINPDTSKNQFSLQLKSVTPEDTAVYYCARSSPE | |
| | | GLFLYWFDPWGQGTLVTVSSGGDGSGGGGSGGGGS | |
| | | SSELTQDPAVSVALGQTIRITCQGDSLGNYYATWY | |
| | | QQKPGQAPVLVIYGTNNRPSGIPDRFSASSSGNTA | |
| | | SLTITGAQAEDEADYYCNSRDSSGHHLLFGTGTKV | |
| | | TVL | |
| BCMA- | VH | EVQLVESGGGLVQPGGSLRLSCAASGFTFSSYAMS | 330 |
| 24 | | WVRQAPGKGLEQVSAISGSGGSTYYADSVKGRFTI | |
| | | SRDNSKNTLYLQMNSLRAEDTAVYYCAKVEGSGSL | |
| | | DYWGQGTLVTVSS | |
| | VL | EIVMTQSPGTLSLSPGERATLSCRASQSVSSAYLA | 331 |
| | | WYQQKPGQPPRLLISGASTRATGIPDRFGGSGSGT | |
| | | DFTLTISRLEPEDFAVYYCQHYGSSFNGSSLFTFG | |
| | | QGTRLEIK | |
| | scFv | EVQLVESGGGLVQPGGSLRLSCAASGFTFSSYAMS | 332 |
| | | WVRQAPGKGLEQVSAISGSGGSTYYADSVKGRFTI | |
| | | SRDNSKNTLYLQMNSLRAEDTAVYYCAKVEGSGSL | |
| | | DYWGQGTLVTVSSGGGGSGGGGSGGGGSEIVMTQS | |
| | | PGTLSLSPGERATLSCRASQSVSSAYLAWYQQKPG | |
| | | QPPRLLISGASTRATGIPDRFGGSGSGTDFTLTIS | |
| | | RLEPEDFAVYYCQHYGSSFNGSSLFTFGQGTRLEI | |
| | | K | |
| | VH | EVQLVETGGGLVQPGGSLRLSCAASGITFSRYPMS | 333 |
| | | QVRQAPGKGLEWVSGISDSGVSTYYADSAKGRFTI | |
| | | SRDNSKNTLFLQMSSLRDEDTAVYYCVTRAGSEAS | |
| | | DIWGQGTMVTVSS | |
| BCMA- | VL | EIVLTQSPATLSLSPGERATLSCRASQSVSNSLAW | 334 |
| 25 | | YQQKPGQAPRLLIYDASSRATGIPDRFSGSGSGTD | |
| | | FTLTISRLEPEDFAIYYCQQFGTSSGLTFGGGTKL | |
| | | EIK | |
| | scFv | EVQLVETGGGLVQPGGSLRLSCAASGITFSRYPMS | 335 |
| | | WVRQAPGKGLEWVSGISDSGVSTYYADSAKGRFTI | |
| | | SRDNSKNTLFLQMSSLRDEDTAVYYCVTRAGSEAS | |
| | | DIWGQGTMVTVSSGGGGSGGGGSGGGGSEIVLTQS | |
| | | PATLSLSPGERATLSCRASQSVSNSLAWYQQKPGQ | |
| | | APRLLIYDASSRATGIPDRFSGSGSGTDFTLTISR | |
| | | LEPEDFAIYYCQQFGTSSGLTFGGGTKLEIK | |
| BCMA- | VH | QVQLVESGGGLVQPGGSLRLSCAASGFTFSSYAMS | 336 |
| 26 | | WVRQAPGKGLEWVSAISGSGGSTYYADSVKGRFTI | |
| | | SRDNAKNSLYLQMNSLRAEDTAIYYCARATYKREL | |
| | | RYYYGMDVWGQGTMVTVSS | |
| | VL | EIVMTQSPGTVSLSPGERATLSCRASQSVSSSFLA | 337 |
| | | WYQQKPGQAPRLLIYGASSRATGIPDRFSGSGSGT | |
| | | DFTLTISRLEPEDSAVYYCQQYHSSPSWTFGQGTR | |
| | | LEIK | |
| | scFv | QVQLVESGGGLVQPGGSLRLSCAASGFTFSSYAMS | 338 |
| | | WVRQAPGKGLEWVSAISGSGGSTYYADSVKGRFTI | |
| | | SRDNAKNSLYLQMNSLRAEDTAIYYCARATYKREL | |
| | | RYYYGMDVWGQGTMVTVSSGGGGSGGGGSGGGGSE | |
| | | IVMTQSPGTVSLSPGERATLSCRASQSVSSSFLAW | |
| | | YQQKPGQAPRLLIYGASSRATGIPDRFSGSGSGTD | |
| | | FTLTISRLEPEDSAVYYCQQYHSSPSWTFGQGTRL | |
| | | EIK | |
| BCMA- | VH | EVQLVETGGGLVQPGGSLRLSCAASGFTFSSYAMS | 339 |
| 27 | | WVRQAPGKGLEWVSAISGSGGSTYYADSVKGRFTI | |
| | | SRDNSKNTLYLQMNTLKAEDTAVYYCARATYKREL | |
| | | RYYYGMDVWGQGTTVTVSS | |
| | VL | EIVLTQSPSTLSLSPGESATLSCRASQSVSTTFLA | 340 |
| | | WYQQKPGQAPRLLIYGSSNRATGIPDRFSGSGSGT | |
| | | DFTLTIRRLEPEDFAVYYCQQYHSSPSWTFGQGTK | |
| | | VEIK | |
| | scFv | EVQLVETGGGLVQPGGSLRLSCAASGFTFSSYAMS | 341 |
| | | WVRQAPGKGLEWVSAISGSGGSTYYADSVKGRFTI | |
| | | SRDNSKNTLYLQMNTLKAEDTAVYYCARATYKREL | |
| | | RYYYGMDVWGQGTTVTVSSGGGGSGGGGSGGGGSE | |
| | | IVLTQSPSTLSLSPGESATLSCRASQSVSTTFLAW | |
| | | YQQKPGQAPRLLIYGSSNRATGIPDRFSGSGSGTD | |
| | | FTLTIRRLEPEDFAVYYCQQYHSSPSWTFGQGTKV | |
| | | EIK | |
| BCMA- | VH | EVQLVETGGGLVQPGRSLRLSCAASGFTFDDYAMH | 342 |
| 28 | | WVRQAPGKGLEWVSGISWNSGSIGYADSVKGRFTI | |
| | | SRDNAKNSLYLQMNSLRDEDTAVYYCARVGKAVPD | |
| | | VWGQGTTVTVSS | |
| | VL | DIVMTQTPSSLSASVGDRVTITCRASQSISSYLNW | 343 |
| | | YQQKPGKAPKLLIYAASSLQSGVPSRFSGSGSGTD | |
| | | FTLTISSLQPEDFATYYCQQSYSTPYSFGQGTRLE | |
| | | IK | |
| | scFv | EVQLVETGGGLVQPGRSLRLSCAASGFTFDDYAMH | 344 |
| | | WVRQAPGKGLEWVSGISWNSGSIGYADSVKGRFTI | |
| | | SRDNAKNSLYLQMNSLRDEDTAVYYCARVGKAVPD | |
| | | VWGQGTTVTVSSGGGGSGGGGSGGGGSDIVMTQTP | |
| | | SSLSASVGDRVTITCRASQSISSYLNWYQQKPGKA | |
| | | PKLLIYAASSLQSGVPSRFSGSGSGTDFTLTISSL | |
| | | QPEDFATYYCQQSYSTPYSFGQGTRLEIK | |
| BCMA- | VH | EVQLVESGGGLVQPGRSLRLSCTASGFTFDDYAMH | 345 |
| 29 | | WVRQRPGKGLWEWVASINWKGNSLAYGDSVKGRFA | |
| | | ISRDNAKNTVFLQMNSLRTEDTAVYYCASHQGVAY | |
| | | YNYAMDVWGRGTLVTVSS | |
| | VL | EIVLTQSPGTLSLSPGERATLSCRATQSIGSSFLA | 346 |
| | | WYQQRPGQAPRLLIYGASQRATGIPDRFSGRGSGT | |
| | | DFTLTISRVEPEDSAVYYCQHYESSPSWTFGQGTK | |
| | | VEIK | |
| | scFv | EVQLVESGGGLVQPGRSLRLSCTASGFTFDDYAMH | 347 |
| | | WVRQRPGKGLEWVASINWKGNSLAYGDSVKGRFAI | |
| | | SRDNAKNTVFLQMNSLRTEDTAVYYCASHQGVAYY | |
| | | NYAMDVWGRGTLVTVSSGGGGSGGGGSGGGGSEIV | |
| | | LTQSPGTLSLSPGERATLSCRATQSIGSSFLAWYQ | |
| | | QRPGQAPRLLIYGASQRATGIPDRFSGRGSGTDFT | |
| | | LTISRVEPEDSAVYYCQHYESSPSWTFGQGTKVEI | |
| | | K | |
| BCMA- | VH | EVQLVESGGGLVQPGGSLRLSCAASGFTFSSYAMS | 348 |
| 30 | | WVRQAPGKGLEWVSAISGSGGSTYYADSVKGRFTI | |
| | | SRDNSKNTLYLQMNSLRAEDTAVYYCAKVVRDGMD | |
| | | VWGQGTTVTVSS | |
| | VL | EIVLTQSPATLSLSPGERATLSCRASQSVSSSYLA | 349 |
| | | WYQQKPGQAPRLLIYGASSRATGIPDRFSGNGSGT | |
| | | DFTLTISRLEPEDFAVYYCQQYGSPPRFTFGPGTK | |
| | | VDIK | |
| | scFv | EVQLVESGGGLVQPGGSLRLSCAASGFTFSSYAMS | 350 |
| | | WVRQAPGKGLEWVSAISGSGGSTYYADSVKGRFTI | |
| | | SRDNSKNTLYLQMNSLRAEDTAVYYCAKVVRDGMD | |
| | | VWGQGTTVTVSSGGGGSGGGGSGGGGSEIVLTQSP | |
| | | ATLSLSPGERATLSCRASQSVSSSYLAWYQQKPGQ | |
| | | APRLLIYGASSRATGIPDRFSGNGSGTDFTLTISR | |
| | | LEPEDFAVYYCQQYGSPPRFTFGPGTKVDIK | |
| BCMA- | VH | EVQLLESGGGLVQPGGSLRLSCAASGFTFSSYAMS | 351 |
| 31 | | WVRQAPGKGLEWVSAISGSGGSTYYADSVKGRFTI | |
| | | SRDNSKNTLYLQMNSLRAEDTAVYYCAKIPQTGTF | |
| | | DYWGQGTLVTVSS | |
| | VL | EIVLTQSPGTLSLSPGERATLSCRASQSVSSSYLA | 352 |
| | | WYQQRPGQAPRLLIYGASSRATGIPDRFSGSGSGT | |
| | | DFTLTISRLEPEDFAVYYCQHYGSSPSWTFGQGTR | |
| | | LEIK | |
| | scFv | EVQLLESGGGLVQPGGSLRLSCAASGFTFSSYAMS | 353 |
| | | WVRQAPGKGLEWVSAISGSGGSTYYADSVKGRFTI | |
| | | SRDNSKNTLYLQMNSLRAEDTAVYYCAKIPQTGTF | |
| | | DYWGQGTLVTVSSGGGGSGGGGSGGGGSEIVLTQS | |
| | | PGTLSLSPGERATLSCRASQSVSSSYLAWYQQRPG | |
| | | QAPRLLIYGASSRATGIPDRFSGSGSGTDFTLTIS | |
| | | RLEPEDFAVYYCQHYGSSPSWTFGQGTRLEIK | |
| BCMA- | VH | EVQLVETGGGLVQPGGSLRLSCAASGFTFSSYAMS | 354 |
| 32 | | WVRQAPGKGLEWVSAISGSGGSTYYADSVKGRFTM | |
| | | SRENDKNSVFLQMNSLRVEDTGVYYCARANYKREL | |
| | | RYYYGMDVWGQGTMVTVSS | |
| | VL | EIVMTQSPGTLSLSPGESATLSCRASQRVASNYLA | 355 |
| | | WYQHKPGQAPSLLISGASSRATGVPDRFSGSGSGT | |
| | | DFTLAISRLEPEDSAVYYCQHYDSSPSWTFGQGTK | |
| | | VEIK | |
| | scFv | EVQLVETGGGLVQPGGSLRLSCAASGFTFSSYAMS | 356 |
| | | WVRQAPGKGLEWVSAISGSGGSTYYADSVKGRFTM | |
| | | SRENDKNSVFLQMNSLRVEDTGVYYCARANYKREL | |
| | | RYYYGMDVWGQGTMVTVSSGGGGSGGGGSGGGGSE | |
| | | IVMTQSPGTLSLSPGESATLSCRASQRVASNYLAW | |
| | | YQHKPGQAPSLLISGASSRATGVPDRFSGSGSGTD | |
| | | FTLAISRLEPEDSAVYYCQHYDSSPSWTFGQGTKV | |
| | | EIK | |
| BCMA- | VH | EVQLLETGGGLVQPGGSLRLSCAASGFSFSSYAMS | 357 |
| 33 | | WVRQAPGKGLEWVSAISGSGGSTYYADSVKGRFTI | |
| | | SRDNSKNTLYLQMNSLRAEDTAVYYCAKALVGATG | |
| | | AFDIWGQGTLVTVSS | |
| | VL | EIVLTQSPGTLSLSPGERATLSCRASQSLSSNFLA | 358 |
| | | WYQQKPGQAPGLLIYGASNWATGTPDRFSGSGSGT | |
| | | DFTLTITRLEPEDFAVYYCQYYGTSPMYTFGQGTK | |
| | | VEIK | |
| | scFv | EVQLLETGGGLVQPGGSLRLSCAASGFSFSSYAMS | 359 |
| | | WVRQAPGKGLEWVSAISGSGGSTYYADSVKGRFTI | |
| | | SRDNSKNTLYLQMNSLRAEDTAVYYCAKALVGATG | |
| | | AFDIWGQGTLVTVSSGGGGSGGGGSGGGGSEIVLT | |
| | | QSPGTLSLSPGERATLSCRASQSLSSNFLAWYQQK | |
| | | PGQAPGLLIYGASNWATGTPDRFSGSGSGTDFTLT | |
| | | ITRLEPEDFAVYYCQYYGTSPMYTFGQGTKVEIK | |
| BCMA- | VH | EVQLLESGGGLVQPGGSLRLSCAASGFTFSSYAMS | 360 |
| 34 | | WVRQAPGKGLEWVSAISGSGGSTYYADSVKGRFTI | |
| | | SRDNSKNTLYLQMNSLRAEDTAVYYCVLWFGEGFD | |
| | | PWGQGTLVTVSS | |
| | VL | DIVLTQSPLSLPVTPGEPASISCRSSQSLLHSNGY | 361 |
| | | NYLDWYLQKPGQSPQLLIYLGSNRASGVPDRFSGS | |
| | | GSGTDFTLKISRVEAEDVGVYYCMQALQTPLTFGG | |
| | | GTKVDIK | |
| | scFv | EVQLLESGGGLVQPGGSLRLSCAASGFTFSSYAMS | 362 |
| | | WVRQAPGKGLEWVSAISGSGGSTYYADSVKGRFTI | |
| | | SRDNSKNTLYLQMNSLRAEDTAVYYCVLWFGEGFD | |
| | | PWGQGTLVTVSSGGGGSGGGGSGGGGSDIVLTQSP | |
| | | LSLPVTPGEPASISCRSSQSLLHSNGYNYLDWYLQ | |
| | | KPGQSPQLLIYLGSNRASGVPDRFSGSGSGTDFTL | |
| | | KISRVEAEDVGVYYCMQALQTPLTFGGGTKVDIK | |
| BCMA- | VH | QVQLVESGGGLVQPGGSLRLSCAASGFTFSSYAMS | 363 |
| 35 | | WVRQAPGKGLEWVSAISGSGGSTYYADSVKGRFTI | |
| | | SRDNSKNTLYLQMNSLRAEDTAVYYCAKVGYDSSG | |
| | | YYRDYYGMDVWGQGTTVTVSS | |
| | VL | EIVLTQSPGTLSLSPGERATLSCRASQSVSSSYLA | 364 |
| | | WYQQKPGQAPRLLIYGTSSRATGISDRFSGSGSGT | |
| | | DFTLTISRLEPEDFAVYYCQHYGNSPPKFTFGPGT | |
| | | KLEIK | |
| | scFv | QVQLVESGGGLVQPGGSLRLSCAASGFTFSSYAMS | 365 |
| | | WVRQAPGKGLEWVSAISGSGGSTYYADSVKGRFTI | |
| | | SRDNSKNTLYLQMNSLRAEDTAVYYCAKVGYDSSG | |
| | | YYRDYYGMDVWGQGTTVTVSSGGGGSGGGGSGGGG | |
| | | SEIVLTQSPGTLSLSPGERATLSCRASQSVSSSYL | |
| | | AWYQQKPGQAPRLLIYGTSSRATGISDRFSGSGSG | |
| | | TDFTLTISRLEPEDFAVYYCQHYGNSPPKFTFGPG | |
| | | TKLEIK | |
| BCMA- | VH | EVQLVESGGGLVQPGGSLRLSCAASGFTFSSYAMS | 366 |
| 36 | | WVRQAPGKGLEWVSAISGSGGSTYYADSVKGRFTI | |
| | | SRDNSKNTLYLQMNSLRAEDTAVYYCAKMGWSSGY | |
| | | LGAFDIWGQGTTVTVSS | |
| | VL | EIVLTQSPGTLSLSPGERATLSCRASQSVASSFLA | 367 |
| | | WYQQKPGQAPRLLIYGASGRATGIPDRFSGSGSGT | |
| | | DFTLTISRLEPEDFAVYYCQHYGGSPRLTFGGGTK | |
| | | VDIK | |
| | scFv | EVQLVESGGGLVQPGGSLRLSCAASGFTFSSYAMS | 368 |
| | | WVRQAPGKGLEWVSAISGSGGSTYYADSVKGRFTI | |
| | | SRDNSKNTLYLQMNSLRAEDTAVYYCAKMGWSSGY | |
| | | LGAFDIWGQGTTVTVSSGGGGSGGGGSGGGGSEIV | |
| | | LTQSPGTLSLSPGERATLSCRASQSVASSFLAWYQ | |
| | | QKPGQAPRLLIYGASGRATGIPDRFSGSGSGTDFT | |
| | | LTISRLEPEDFAVYYCQHYGGSPRLTFGGGTKVDI | |
| | | K | |
| BCMA- | VH | QIQLVQSGPDLKKPGETVKLSCKASGYTFTNFGMN | 369 |
| 37 | | WVKQAPGKGFKWMAWINTYTGESYFADDFKGRFAF | |
| | | SVETSATTAYLQINNLKTEDTATYFCARGEIYYGY | |
| | | DGGFAYWGQGTLVTVSA | |
| | VL | DVVMTQSHRFMSTSVGDRVSITCRASQDVNTAVSW | 370 |
| | | YQQKPGQSPKLLIFSASYRYTGVPDRFTGSGSGAD | |
| | | FTLTISSVQAEDLAVYYCQQHYSTPWTFGGGTKLD | |
| | | IK | |
| | scFv | QIQLVQSGPDLKKPGETVKLSCKASGYTFTNFGMN | 371 |
| | | WVKQAPGKGFKWMAWINTYTGESYFADDFKGRFAF | |
| | | SVETSATTAYLQINNLKTEDTATYFCARGEIYYGY | |
| | | DGGFAYWGQGTLVTVSAGGGGSGGGGSGGGGSDVV | |
| | | MTQSHRFMSTSVGDRVSITCRASQDVNTAVSWYQQ | |
| | | KPGQSPKLLIFSASYRYTGVPDRFTGSGSGADFTL | |
| | | TISSVQAEDLAVYYCQQHYSTPWTFGGGTKLDIK | |
| BCMA- | VH | QIQLVQSGPELKKPGETVKISCKASGYTFTDYSIN | 372 |
| 38 | | WVKRAPGKGLKWMGWINTETREPAYAYDFRGRFAF | |
| | | SLETSASTAYLQINNLKYEDTATYFCALDYSYAMD | |
| | | YWGQGTSVTVSS | |
| | VL | DIVLTQSPASLAMSLGKRATISCRASESVSVIGAH | 373 |
| | | LIHWYQQKPGQPPKLLIYLASNLETGVPARFSGSG | |
| | | SGTDFTLTIDPVEEDDVAIYSCLQSRIFPRTFGGG | |
| | | TKLEIK | |
| | scFv | QIQLVQSGPELKKPGETVKISCKASGYTFTDYSIN | 374 |
| | | WVKRAPGKGLKWMGWINTETREPAYAYDFRGRFAF | |
| | | SLETSASTAYLQINNLKYEDTATYFCALDYSYAMD | |
| | | YWGQGTSVTVSSGGGGSGGGGSGGGGSQIQLVQSG | |
| | | PELKKPGETVKISCKASGYTFTDYSINWVKRAPGK | |
| | | GLKWMGWINTETREPAYAYDFRGRFAFSLETSAST | |
| | | AYLQINNLKYEDTATYFCALDYSYAMDYWGQGTSV | |
| | | TVSS | |
| BCMA- | VH | QIQLVQSGPELKKPGETVKISCKASGYTFRHYSMN | 375 |
| 39 | | WVKQAPGKGLKWMGRINTESGVPIYADDFKGRFAF | |
| | | SVETSASTAYLVINNLKDEDTASYFCSNDYLYSLD | |
| | | FWGQGTALTVSS | |
| | VL | DIVLTQSPPSLAMSLGKRATISCRASESVTILGSH | 376 |
| | | LIYWYQQKPGQPPTLLIQLASNVQTGVPARFSGSG | |
| | | SRTDFTLTIDPVEEDDVAVYYCLQSRTIPRTFGGG | |
| | | TKLEIK | |
| | scFv | QIQLVQSGPELKKPGETVKISCKASGYTFRHYSMN | 377 |
| | | WVKQAPGKGLKWMGRINTESGVPIYADDFKGRFAF | |
| | | SVETSASTAYLVINNLKDEDTASYFCSNDYLYSLD | |
| | | FWGQGTALTVSSGGGGSGGGGSGGGGSDIVLTQSP | |
| | | PSLAMSLGKRATISCRASESVTILGSHLIYWYQQK | |
| | | PGQPPTLLIQLASNVQTGVPARFSGSGSRTDFTLT | |
| | | IDPVEEDDVAVYYCLQSRTIPRTFGGGTKLEIK | |
| BCMA- | VH | QIQLVQSGPELKKPGETVKISCKASGYTFTHYSMN | 378 |
| 40 | | WVKQAPGKGLKWMGRINTETGEPLYADDFKGRFAF | |
| | | SLETSASTAYLVINNLKNEDTATFFCSNDYLYSCD | |
| | | YWGQGTTLTVSS | |
| | VL | DIVLTQSPPSLAMSLGKRATISCRASESVTILGSH | 376 |
| | | LIYWYQQKPGQPPTLLIQLASNVQTGVPARFSGSG | |
| | | SRTDFTLTIDPVEEDDVAVYYCLQSRTIPRTFGGG | |
| | | TKLEIK | |
| | scFv | QIQLVQSGPELKKPGETVKISCKASGYTFTHYSMN | 379 |
| | | WVKQAPGKGLKWMGRINTETGEPLYADDFKGRFAF | |
| | | SLETSASTAYLVINNLKNEDTATFFCSNDYLYSCD | |
| | | YWGQGTTLTVSSGGGGSGGGGSGGGGSDIVLTQSP | |
| | | PSLAMSLGKRATISCRASESVTILGSHLIYWYQQK | |
| | | PGQPPTLLIQLASNVQTGVPARFSGSGSRTDFTLT | |
| | | IDPVEEDDVAVYYCLQSRTIPRTFGGGTKLEIK | |

TABLE 12B
BCMA Binders - Light chain CDR sequences
according to Kabat numbering scheme

| | | SEQ | | SEQ | | SEQ |
|---|---|---|---|---|---|---|
| Anti- | | ID | | ID | | ID |
| body | CDR-L1 | NO: | CDR-L2 | NO: | CDR-L3 | NO: |
| BCMA- | RASQSISSYLN | 380 | AASSLQS | 412 | QQSYSTPYT | 441 |
| 1 | | | | | | |
| BCMA- | RASQSISSSFLA | 381 | GASRRAT | 413 | QQYHSSPSWT | 442 |
| 2 | | | | | | |
| BCMA- | RSSQSLLHSNGY | 382 | LGSNRAS | 414 | MQALQTPYT | 443 |
| 3 | NYLD | | | | | |
| BCMA- | KSSQSLLRNDGK | 383 | EVSNRFS | 415 | MQNIQFPS | 444 |
| 4 | TPLY | | | | | |
| BCMA- | RSSQSLLHSNGY | 384 | LGSKRAS | 416 | MQALQTPYT | 443 |
| 5 | NYLN | | | | | |
| BCMA- | RASQSISSYLN | 380 | GASTLAS | 417 | QQSYKRAS | 445 |
| 6 | | | | | | |
| BCMA- | RSSQSLLYSNGY | 385 | LGSNRAS | 414 | MQGRQFPYS | 446 |
| 7 | NYVD | | | | | |
| BCMA- | RASQSVSSNLA | 386 | GASTRAS | 418 | QQYGSSLT | 447 |
| 8 | | | | | | |
| BCMA- | RASQSVSSKLA | 387 | GASIRAT | 419 | QQYGSSSWT | 448 |
| 9 | | | | | | |
| BCMA- | RASQSVGSTNLA | 388 | DASNRAT | 158 | QQYGSSPPWT | 449 |
| 10 | | | | | | |
| BCMA- | RASQSISSYLN | 380 | AASSLQS | 412 | QQSYTLA | 450 |
| 11 | | | | | | |
| BCMA- | KSSESLVHNSGK | 389 | EVSNRDS | 420 | MQGTHWPGT | 451 |
| 12 | TYLN | | | | | |
| BCMA- | QASEDINKFLN | 390 | DASTLQT | 421 | QQYESLPLT | 452 |
| 13 | | | | | | |
| BCMA- | RASQSVGSNLA | 391 | GASTRAT | 422 | QQYNDWLPVT | 453 |
| 14 | | | | | | |
| BCMA- | RASQSIGSSSLA | 392 | GASSRAS | 423 | QQYAGSPPFT | 454 |
| 15 | | | | | | |
| BCMA- | KASQDIDDAMN | 393 | SATSPVP | 424 | LQHDNFPLT | 455 |
| 16 | | | | | | |
| BCMA- | RASQDIYNNLA | 394 | AANKSQS | 425 | QHYYRFPYS | 456 |
| 17 | | | | | | |
| BCMA- | RSSQSLLHSNGY | 382 | LGSNRAS | 414 | MQALQTPYT | 443 |
| 18 | NYLD | | | | | |
| BCMA- | GGNNIGTKSVH | 395 | DDSVRPS | 426 | QVWDSDSEHV | 457 |
| 19 | | | | | V | |
| BCMA- | SGDGLSKKYVS | 396 | RDKERPS | 427 | QAWDDTTVV | 458 |
| 20 | | | | | | |
| BCMA- | RASQGIRNWLA | 397 | AASNLQS | 428 | QKYNSAPFT | 459 |
| 21 | | | | | | |
| BCMA- | GGNNIGSKSVH | 398 | GKNNRPS | 429 | SSRDSSGDHL | 460 |
| 22 | | | | | RV | |
| BCMA- | QGDSLGNYYAT | 399 | GTNNRPS | 430 | NSRDSSGHHL | 461 |
| 23 | | | | | L | |
| BCMA- | RASQSVSSAYLA | 400 | GASTRAT | 422 | QHYGSSFNGS | 462 |
| 24 | | | | | SLFT | |
| BCMA- | RASQSVSNSLA | 401 | DASSRAT | 431 | QQFGTSSGLT | 463 |
| 25 | | | | | | |
| BCMA- | RASQSVSSSFLA | 402 | GASSRAT | 432 | QQYHSSPSWT | 442 |
| 26 | | | | | | |
| BCMA- | RASQSVSTTFLA | 403 | GSSNRAT | 433 | QQYHSSPSWT | 442 |
| 27 | | | | | | |
| BCMA- | RASQSISSYLN | 380 | AASSLQS | 412 | QQSYSTPYS | 464 |
| 28 | | | | | | |
| BCMA- | RATQSIGSSFLA | 404 | GASQRAT | 434 | QHYESSPSWT | 465 |
| 29 | | | | | | |
| BCMA- | RASQSVSSSYLA | 405 | GASSRAT | 432 | QQYGSPPRFT | 466 |
| 30 | | | | | | |
| BCMA- | RASQSVSSSYLA | 405 | GASSRAT | 432 | QHYGSSPSWT | 467 |
| 31 | | | | | | |
| BCMA- | RASQRVASNYLA | 406 | GASSRAT | 432 | QHYDSSPSWT | 468 |
| 32 | | | | | | |
| BCMA- | RASQSLSSNFLA | 407 | GASNWAT | 435 | QYYGTSPMYT | 469 |
| 33 | | | | | | |
| BCMA- | RSSQSLLHSNGY | 382 | LGSNRAS | 414 | MQALQTPLT | 470 |
| 34 | NYLD | | | | | |
| BCMA- | RASQSVSSSYLA | 405 | GTSSRAT | 436 | QHYGNSPPKF | 471 |
| 35 | | | | | T | |
| BCMA- | RASQSVASSFLA | 408 | GASGRAT | 437 | QHYGGSPRLT | 472 |
| 36 | | | | | | |
| BCMA- | RASQDVNTAVS | 409 | SASYRYT | 438 | QQHYSTPWT | 473 |
| 37 | | | | | | |
| BCMA- | RASESVSVIGAH | 410 | LASNLET | 439 | LQSRIFPRT | 474 |
| 38 | LIH | | | | | |
| BCMA- | RASESVTILGSH | 411 | LASNVQT | 440 | LQSRTIPRT | 475 |
| 39 | LIY | | | | | |
| BCMA- | RASESVTILGSH | 411 | LASNVQT | 440 | LQSRTIPRT | 475 |
| 40 | LIY | | | | | |

TABLE 12C
BCMA Binders - Light chain CDR sequences
according to Chothia numbering scheme

| | | SEQ | | SEQ | | SEQ |
|---|---|---|---|---|---|---|
| Anti- | | ID | CDR- | ID | | ID |
| body | CDR-L1 | NO: | L2 | NO: | CDR-L3 | NO: |
| BCMA-1 | SQSISSY | 476 | AAS | 507 | SYSTPY | 520 |
| BCMA-2 | SQSISSSF | 477 | GAS | 508 | YHSSPSW | 521 |
| BCMA-3 | SQSLLHSNGYNY | 478 | LGS | 509 | ALQTPY | 522 |
| BCMA-4 | SQSLLRNDGKTP | 479 | EVS | 510 | NIQFP | 523 |
| BCMA-5 | SQSLLHSNGYNY | 478 | LGS | 509 | ALQTPY | 522 |
| BCMA-6 | SQSISSY | 476 | GAS | 508 | SYKRA | 524 |
| BCMA-7 | SQSLLYSNGYNY | 480 | LGS | 509 | GRQFPY | 525 |
| BCMA-8 | SQSVSSN | 481 | GAS | 508 | YGSSL | 526 |
| BCMA-9 | SQSVSSK | 482 | GAS | 508 | YGSSSW | 527 |
| BCMA-10 | SQSVGSTN | 483 | DAS | 217 | YGSSPPW | 528 |
| BCMA-11 | SQSISSY | 476 | AAS | 507 | SYTL | 529 |
| BCMA-12 | SESLVHNSGKTY | 484 | EVS | 510 | GTHWPG | 530 |
| BCMA-13 | SEDINKF | 485 | DAS | 217 | YESLPL | 531 |
| BCMA-14 | SQSVGSN | 486 | GAS | 508 | YNDWLPV | 532 |
| BCMA-15 | SQSIGSSS | 487 | GAS | 508 | YAGSPPF | 533 |
| BCMA-16 | SQDIDDA | 488 | SAT | 511 | HDNFPL | 534 |
| BCMA-17 | SQDIYNN | 489 | AAN | 512 | YYRFPY | 535 |
| BCMA-18 | SQSLLHSNGYNY | 478 | LGS | 509 | ALQTPY | 522 |
| BCMA-19 | NNIGTKS | 490 | DDS | 513 | WDSDSEHV | 536 |
| BCMA-20 | DGLSKKY | 491 | RDK | 514 | WDDTTV | 537 |
| BCMA-21 | SQGIRNW | 492 | AAS | 507 | YNSAPF | 538 |
| BCMA-22 | NNIGSKS | 493 | GKN | 515 | RDSSGDHLR | 539 |
| BCMA-23 | DSLGNYY | 494 | GTN | 213 | RDSSGHHL | 540 |
| BCMA-24 | SQSVSSAY | 495 | GAS | 508 | YGSSFNGSSLF | 541 |
| BCMA-25 | SQSVSNS | 496 | DAS | 217 | FGTSSGL | 542 |
| BCMA-26 | SQSVSSSF | 497 | GAS | 508 | YHSSPSW | 521 |
| BCMA-27 | SQSVSTTF | 498 | GSS | 516 | YHSSPSW | 521 |
| BCMA-28 | SQSISSY | 476 | AAS | 507 | SYSTPY | 520 |
| BCMA-29 | TQSIGSSF | 499 | GAS | 508 | YESSPSW | 543 |
| BCMA-30 | SQSVSSSY | 500 | GAS | 508 | YGSPPRF | 544 |
| BCMA-31 | SQSVSSSY | 500 | GAS | 508 | YGSSPSW | 545 |
| BCMA-32 | SQRVASNY | 501 | GAS | 508 | YDSSPSW | 546 |
| BCMA-33 | SQSLSSNF | 502 | GAS | 508 | YGTSPMY | 547 |
| BCMA-34 | SQSLLHSNGYNY | 478 | LGS | 509 | ALQTPL | 548 |
| BCMA-35 | SQSVSSSY | 500 | GTS | 517 | YGNSPPKF | 549 |
| BCMA-36 | SQSVASSF | 503 | GAS | 508 | YGGSPRL | 550 |
| BCMA-37 | SQDVNTA | 504 | SAS | 518 | HYSTPW | 551 |
| BCMA-38 | SESVSVIGAHL | 505 | LAS | 519 | SRIFPR | 552 |
| BCMA-39 | SESVTILGSHL | 506 | LAS | 519 | SRTIPR | 553 |
| BCMA-40 | SESVTILGSHL | 506 | LAS | 519 | SRTIPR | 553 |

TABLE 12D
BCMA Binders - Light chain CDR sequences according
to combination of Kabat and Chothia numbering schemes

| | | SEQ | | SEQ | | SEQ |
|---|---|---|---|---|---|---|
| Antibody | CDR-L1 | ID NO: | CDR-L2 | ID NO: | CDR-L3 | ID NO: |
| BCMA-1 | RASQSISSYLN | 380 | AASSLQS | 412 | QQSYSTPYT | 441 |
| BCMA-2 | RASQSISSSFLA | 381 | GASRRAT | 413 | QQYHSSPSWT | 442 |
| BCMA-3 | RSSQSLLHSNGYN | 382 | LGSNRAS | 414 | MQALQTPYT | 443 |
| | YLD | | | | | |
| BCMA-4 | KSSQSLLRNDGKT | 383 | EVSNRFS | 415 | MQNIQFPS | 444 |
| | PLY | | | | | |
| BCMA-5 | RSSQSLLHSNGYN | 384 | LGSKRAS | 416 | MQALQTPYT | 443 |
| | YLN | | | | | |
| BCMA-6 | RASQSISSYLN | 380 | GASTLAS | 417 | QQSYKRAS | 445 |
| BCMA-7 | RSSQSLLYSNGYN | 385 | LGSNRAS | 414 | MQGRQFPYS | 446 |
| | YVD | | | | | |
| BCMA-8 | RASQSVSSNLA | 386 | GASTRAS | 418 | QQYGSSLT | 447 |
| BCMA-9 | RASQSVSSKLA | 387 | GASIRAT | 419 | QQYGSSSWT | 448 |
| BCMA-10 | RASQSVGSTNLA | 388 | DASNRAT | 158 | QQYGSSPPWT | 449 |
| BCMA-11 | RASQSISSYLN | 380 | AASSLQS | 412 | QQSYTLA | 450 |
| BCMA-12 | KSSESLVHNSGKT | 389 | EVSNRDS | 420 | MQGTHWPGT | 451 |
| | YLN | | | | | |
| BCMA-13 | QASEDINKFLN | 390 | DASTLQT | 421 | QQYESLPLT | 452 |
| BCMA-14 | RASQSVGSNLA | 391 | GASTRAT | 422 | QQYNDWLPVT | 453 |
| BCMA-15 | RASQSIGSSSLA | 392 | GASSRAS | 423 | QQYAGSPPFT | 454 |
| BCMA-16 | KASQDIDDAMN | 393 | SATSPVP | 424 | LQHDNFPLT | 455 |
| BCMA-17 | RASQDIYNNLA | 394 | AANKSQS | 425 | QHYYRFPYS | 456 |
| BCMA-18 | RSSQSLLHSNGYN | 382 | LGSNRAS | 414 | MQALQTPYT | 443 |
| | YLD | | | | | |
| BCMA-19 | GGNNIGTKSVH | 395 | DDSVRPS | 426 | QVWDSDSEHVV | 457 |
| BCMA-20 | SGDGLSKKYVS | 396 | RDKERPS | 427 | QAWDDTTVV | 458 |
| BCMA-21 | RASQGIRNWLA | 397 | AASNLQS | 428 | QKYNSAPFT | 459 |
| BCMA-22 | GGNNIGSKSVH | 398 | GKNNRPS | 429 | SSRDSSGDHLRV | 460 |
| BCMA-23 | QGDSLGNYYAT | 399 | GTNNRPS | 430 | NSRDSSGHHL | 461 |
| BCMA-24 | RASQSVSSAYLA | 400 | GASTRAT | 422 | QHYGSSFNGSSL | 462 |
| | | | | | FT | |
| BCMA-25 | RASQSVSNSLA | 401 | DASSRAT | 431 | QQFGTSSGLT | 463 |
| BCMA-26 | RASQSVSSSFLA | 402 | GASSRAT | 432 | QQYHSSPSWT | 442 |
| BCMA-27 | RASQSVSTTFLA | 403 | GSSNRAT | 433 | QQYHSSPSWT | 442 |
| BCMA-28 | RASQSISSYLN | 380 | AASSLQS | 412 | QQSYSTPYS | 464 |
| BCMA-29 | RATQSIGSSFLA | 404 | GASQRAT | 434 | QHYESSPSWT | 465 |
| BCMA-30 | RASQSVSSSYLA | 405 | GASSRAT | 432 | QQYGSPPRFT | 466 |
| BCMA-31 | RASQSVSSSYLA | 405 | GASSRAT | 432 | QHYGSSPSWT | 467 |
| BCMA-32 | RASQRVASNYLA | 406 | GASSRAT | 432 | QHYDSSPSWT | 468 |
| BCMA-33 | RASQSLSSNFLA | 407 | GASNWAT | 435 | QYYGTSPMYT | 469 |
| BCMA-34 | RSSQSLLHSNGYN | 382 | LGSNRAS | 414 | MQALQTPLT | 470 |
| | YLD | | | | | |
| BCMA-35 | RASQSVSSSYLA | 405 | GTSSRAT | 436 | QHYGNSPPKFT | 471 |
| BCMA-36 | RASQSVASSFLA | 408 | GASGRAT | 437 | QHYGGSPRLT | 472 |
| BCMA-37 | RASQDVNTAVS | 409 | SASYRYT | 438 | QQHYSTPWT | 473 |
| BCMA-38 | RASESVSVIGAHLI | 410 | LASNLET | 439 | LQSRIFPRT | 474 |
| | H | | | | | |
| BCMA-39 | RASESVTILGSHLI | 411 | LASNVQT | 440 | LQSRTIPRT | 475 |
| | Y | | | | | |
| BCMA-40 | RASESVTILGSHLI | 411 | LASNVQT | 440 | LQSRTIPRT | 475 |
| | Y | | | | | |

TABLE 12E
BCMA Binders - Heavy chain CDR sequences
according to Kabat numbering scheme

| | | SEQ | | SEQ | | SEQ |
|---|---|---|---|---|---|---|
| Antibody | CDR-H1 | ID NO: | CDR-H2 | ID NO: | CDR-H3 | ID NO: |
| BCMA-1 | NHGMS | 554 | GIVYSGSTYYAASVK | 573 | HGGESDV | 595 |
| | | | G | | | |
| BCMA-2 | NYAMS | 555 | GISRSGENTYYADSV | 574 | SPAHYYGGMDV | 596 |
| | | | KG | | | |
| BCMA-3 | DYAMH | 556 | GISWNSGSIGYADSV | 575 | HSFLAY | 597 |
| | | | KG | | | |
| BCMA-4 | NHGMS | 554 | GIVYSGSTYYAASVK | 573 | HGGESDV | 595 |
| | | | G | | | |
| BCMA-5 | NFGIN | 557 | WINPKNNNTNYAQKF | 576 | GPYYYQSYMDV | 598 |
| | | | QG | | | |
| BCMA-6 | SDAMT | 558 | VISGSGGTTYYADSV | 577 | LDSSGYYYARGPR | 599 |
| | | | KG | | Y | |
| BCMA-7 | NYGIT | 559 | WISAYNGNTNYAQKF | 578 | GPYYYYMDV | 600 |
| | | | QG | | | |
| BCMA-8 | NHGMS | 554 | GIVYSGSTYYAASVK | 573 | HGGESDV | 595 |
| | | | G | | | |
| BCMA-9 | NHGMS | 554 | GIVYSGSTYYAASVK | 573 | HGGESDV | 595 |
| | | | G | | | |
| BCMA-10 | NHGMS | 554 | GIVYSGSTYYAASVK | 573 | HGGESDV | 595 |
| | | | G | | | |
| BCMA-11 | DYYMS | 560 | YISSSGSTIYYADSVK | 579 | ESGDGMDV | 601 |
| | | | G | | | |
| BCMA-12 | DYYMS | 560 | YISSSGNTIYYADSVK | 580 | STMVREDY | 602 |
| | | | G | | | |
| BCMA-13 | NHGMS | 554 | GIVYSGSTYYAASVK | 573 | HGGESDV | 595 |
| | | | G | | | |
| BCMA-14 | NHGMS | 554 | GIVYSGSTYYAASVK | 573 | HGGESDV | 595 |
| | | | G | | | |
| BCMA-15 | NHGMS | 554 | GIVYSGSTYYAASVK | 573 | HGGESDV | 595 |
| | | | G | | | |
| BCMA-16 | SSYYYW | 561 | SIYYSGSAYYNPSLKS | 581 | HWQEWPDAFDI | 603 |
| | G | | | | | |
| BCMA-17 | TSGMCV | 562 | RIDWDEDKFYSTSLK | 582 | SGAGGTSATAFDI | 604 |
| | S | | T | | | |
| BCMA-18 | SYSMN | 563 | SISSSSSYIYYADSVK | 583 | TIAAVYAFDI | 605 |
| | | | G | | | |
| BCMA-19 | DYYMS | 560 | YISSSGSTIYYADSVK | 579 | DLRGAFDI | 606 |
| | | | G | | | |
| BCMA-20 | SHYIH | 564 | MINPSGGVTAYSQTL | 584 | EGSGSGVVYFDF | 607 |
| | | | QG | | | |
| BCMA-21 | SGGYYW | 565 | YIYYSGSTYYNPSLKS | 585 | AGIAARLRGAFDI | 608 |
| | S | | | | | |
| BCMA-22 | SYAIS | 566 | GIIPIFGTANYAQKFQ | 586 | RGGYQLLRWDVG | 609 |
| | | | G | | LLRSAFDI | |
| BCMA-23 | SNSAAW | 567 | RTYYRSKVVYSFYAISL | 587 | SSPEGLFLYWFDP | 610 |
| | N | | KS | | | |
| BCMA-24 | SYAMS | 568 | AISGSGGSTYYADSV | 588 | VEGSGSLDY | 611 |
| | | | KG | | | |
| BCMA-25 | RYPMS | 569 | GISDSGVSTYYADSA | 589 | RAGSEASDI | 612 |
| | | | KG | | | |
| BCMA-26 | SYAMS | 568 | AISGSGGSTYYADSV | 588 | ATYKRELRYYYGM | 613 |
| | | | KG | | DV | |
| BCMA-27 | SYAMS | 568 | AISGSGGSTYYADSV | 588 | ATYKRELRYYYGM | 613 |
| | | | KG | | DV | |
| BCMA-28 | DYAMH | 556 | GISWNSGSIGYADSV | 575 | VGKAVPDV | 614 |
| | | | KG | | | |
| BCMA-29 | DYAMH | 556 | SINWKGNSLAYGDSV | 590 | HQGVAYYNYAMD | 615 |
| | | | KG | | V | |
| BCMA-30 | SYAMS | 568 | AISGSGGSTYYADSV | 588 | VVRDGMDV | 616 |
| | | | KG | | | |
| BCMA-31 | SYAMS | 568 | AISGSGGSTYYADSV | 588 | IPQTGTFDY | 617 |
| | | | KG | | | |
| BCMA-32 | SYAMS | 568 | AISGSGGSTYYADSV | 588 | ANYKRELRYYYGM | 618 |
| | | | KG | | DV | |
| BCMA-33 | SYAMS | 568 | AISGSGGSTYYADSV | 588 | ALVGATGAFDI | 619 |
| | | | KG | | | |
| BCMA-34 | SYAMS | 568 | AISGSGGSTYYADSV | 588 | WFGEGFDP | 620 |
| | | | KG | | | |
| BCMA-35 | SYAMS | 568 | AISGSGGSTYYADSV | 588 | VGYDSSGYYRDYY | 621 |
| | | | KG | | GMDV | |
| BCMA-36 | SYAMS | 568 | AISGSGGSTYYADSV | 588 | MGWSSGYLGAFDI | 622 |
| | | | KG | | | |
| BCMA-37 | NFGMN | 570 | WINTYTGESYFADDF | 591 | GEIYYGYDGGFAY | 623 |
| | | | KG | | | |
| BCMA-38 | DYSIN | 571 | WINTETREPAYAYDF | 592 | DYSYAMDY | 624 |
| | | | RG | | | |
| BCMA-39 | HYSMN | 572 | RINTESGVPIYADDFK | 593 | DYLYSLDF | 625 |
| | | | G | | | |
| BCMA-40 | HYSMN | 572 | RINTETGEPLYADDFK | 594 | DYLYSCDY | 626 |
| | | | G | | | |

TABLE 12F
BCMA Binders - Heavy chain CDR sequences according
to Chothia numbering scheme

| | | SEQ | | SEQ | | SEQ |
|---|---|---|---|---|---|---|
| Antibody | CDR-H1 | ID NO: | CDR-H2 | ID NO: | CDR-H3 | ID NO: |
| BCMA-1 | GFALSNH | 627 | VYSGS | 647 | HGGESDV | 595 |
| BCMA-2 | GFTFSNY | 628 | SRSGEN | 648 | SPAHYYGGMDV | 596 |
| BCMA-3 | GFTFDDY | 629 | SWNSGS | 649 | HSFLAY | 597 |
| BCMA-4 | GFALSNH | 627 | VYSGS | 647 | HGGESDV | 595 |
| BCMA-5 | GYIFDNF | 630 | NPKNNN | 650 | GPYYYQSYMDV | 598 |
| BCMA-6 | GFTFSSD | 631 | SGSGGT | 651 | LDSSGYYYARGPRY | 599 |
| BCMA-7 | GYTFSNY | 632 | SAYNGN | 652 | GPYYYYMDV | 600 |
| BCMA-8 | GFALSNH | 627 | VYSGS | 647 | HGGESDV | 595 |
| BCMA-9 | GFALSNH | 627 | VYSGS | 647 | HGGESDV | 595 |
| BCMA-10 | GFALSNH | 627 | VYSGS | 647 | HGGESDV | 595 |
| BCMA-11 | GFTFSDY | 633 | SSSGST | 653 | ESGDGMDV | 601 |
| BCMA-12 | GFTFSDY | 633 | SSSGNT | 654 | STMVREDY | 602 |
| BCMA-13 | GFALSNH | 627 | VYSGS | 647 | HGGESDV | 595 |
| BCMA-14 | GFALSNH | 627 | VYSGS | 647 | HGGESDV | 595 |
| BCMA-15 | GFALSNH | 627 | VYSGS | 647 | HGGESDV | 595 |
| BCMA-16 | GGSISSS | 634 | YYSGS | 655 | HWQEWPDAFDI | 603 |
| | YY | | | | | |
| BCMA-17 | GFSLRTS | 635 | DWDED | 656 | SGAGGTSATAFDI | 604 |
| | GM | | | | | |
| BCMA-18 | GFTFSSY | 636 | SSSSSY | 657 | TIAAVYAFDI | 605 |
| BCMA-19 | GFTFSDY | 633 | SSSGST | 653 | DLRGAFDI | 606 |
| BCMA-20 | GYTVTSH | 637 | NPSGGV | 658 | EGSGSGWYFDF | 607 |
| BCMA-21 | GGSISSG | 638 | YYSGS | 655 | AGIAARLRGAFDI | 608 |
| | GY | | | | | |
| BCMA-22 | GGTFSSY | 639 | IPIFGT | 659 | RGGYQLLRWDVGLLRS | 609 |
| | | | | | AFDI | |
| BCMA-23 | GDSVSSN | 640 | YYRSKWY | 660 | SSPEGLFLYWFDP | 610 |
| | SA | | | | | |
| BCMA-24 | GFTFSSY | 636 | SGSGGS | 661 | VEGSGSLDY | 611 |
| BCMA-25 | GITFSRY | 641 | SDSGVS | 662 | RAGSEASDI | 612 |
| BCMA-26 | GFTFSSY | 636 | SGSGGS | 661 | ATYKRELRYYYGMDV | 613 |
| BCMA-27 | GFTFSSY | 636 | SGSGGS | 661 | ATYKRELRYYYGMDV | 613 |
| BCMA-28 | GFTFDDY | 629 | SWNSGS | 649 | VGKAVPDV | 614 |
| BCMA-29 | GFTFDDY | 629 | NWKGNS | 663 | HQGVAYYNYAMDV | 615 |
| BCMA-30 | GFTFSSY | 636 | SGSGGS | 661 | VVRDGMDV | 616 |
| BCMA-31 | GFTFSSY | 636 | SGSGGS | 661 | IPQTGTFDY | 617 |
| BCMA-32 | GFTFSSY | 636 | SGSGGS | 661 | ANYKRELRYYYGMDV | 618 |
| BCMA-33 | GFSFSSY | 642 | SGSGGS | 661 | ALVGATGAFDI | 619 |
| BCMA-34 | GFTFSSY | 636 | SGSGGS | 661 | WFGEGFDP | 620 |
| BCMA-35 | GFTFSSY | 636 | SGSGGS | 661 | VGYDSSGYYRDYYGMD | 621 |
| | | | | | V | |
| BCMA-36 | GFTFSSY | 636 | SGSGGS | 661 | MGWSSGYLGAFDI | 622 |
| BCMA-37 | GYTFTNF | 643 | NTYTGE | 664 | GEIYYGYDGGFAY | 623 |
| BCMA-38 | GYTFTDY | 644 | NTETRE | 665 | DYSYAMDY | 624 |
| BCMA-39 | GYTFRHY | 645 | NTESGV | 666 | DYLYSLDF | 625 |
| BCMA-40 | GYTFTHY | 646 | NTETGE | 667 | DYLYSCDY | 626 |

TABLE 12G
BCMA Binders - Heavy chain CDR sequences according to
combination of Kabat and Chothia numbering schemes

| | | SEQ | | SEQ | | SEQ |
|---|---|---|---|---|---|---|
| Antibody | CDR-H1 | ID NO: | CDR-H2 | ID NO: | CDR-H3 | ID NO: |
| BCMA-1 | GFALSNHG | 668 | GIVYSGSTYYAAS | 573 | HGGESDV | 595 |
| | MS | | VKG | | | |
| BCMA-2 | GFTFSNYA | 669 | GISRSGENTYYAD | 574 | SPAHYYGGMDV | 596 |
| | MS | | SVKG | | | |
| BCMA-3 | GFTFDDYA | 670 | GISWNSGSIGYAD | 575 | HSFLAY | 597 |
| | MH | | SVKG | | | |
| BCMA-4 | GFALSNHG | 668 | GIVYSGSTYYAAS | 573 | HGGESDV | 595 |
| | MS | | VKG | | | |
| BCMA-5 | GYIFDNFGI | 671 | WINPKNNNTNYA | 576 | GPYYYQSYMDV | 598 |
| | N | | QKFQG | | | |
| BCMA-6 | GFTFSSDA | 672 | VISGSGGTTYYAD | 577 | LDSSGYYYARGPR | 599 |
| | MT | | SVKG | | Y | |
| BCMA-7 | GYTFSNYG | 673 | WISAYNGNTNYA | 578 | GPYYYYMDV | 600 |
| | IT | | QKFQG | | | |
| BCMA-8 | GFALSNHG | 668 | GIVYSGSTYYAAS | 573 | HGGESDV | 595 |
| | MS | | VKG | | | |
| BCMA-9 | GFALSNHG | 668 | GIVYSGSTYYAAS | 573 | HGGESDV | 595 |
| | MS | | VKG | | | |
| BCMA-10 | GFALSNHG | 668 | GIVYSGSTYYAAS | 573 | HGGESDV | 595 |
| | MS | | VKG | | | |
| BCMA-11 | GFTFSDYY | 674 | YISSSGSTIYYADS | 579 | ESGDGMDV | 601 |
| | MS | | VKG | | | |
| BCMA-12 | GFTFSDYY | 674 | YISSSGNTIYYAD | 580 | STMVREDY | 602 |
| | MS | | SVKG | | | |
| BCMA-13 | GFALSNHG | 668 | GIVYSGSTYYAAS | 573 | HGGESDV | 595 |
| | MS | | VKG | | | |
| BCMA-14 | GFALSNHG | 668 | GIVYSGSTYYAAS | 573 | HGGESDV | 595 |
| | MS | | VKG | | | |
| BCMA-15 | GFALSNHG | 668 | GIVYSGSTYYAAS | 573 | HGGESDV | 595 |
| | MS | | VKG | | | |
| BCMA-16 | GGSISSSY | 675 | SIYYSGSAYYNPS | 581 | HWQEWPDAFDI | 603 |
| | YYWG | | LKS | | | |
| BCMA-17 | GFSLRTSG | 676 | RIDWDEDKFYSTS | 582 | SGAGGTSATAFDI | 604 |
| | MCVS | | LKT | | | |
| BCMA-18 | GFTFSSYS | 677 | SISSSSSYIYYADS | 583 | TIAAVYAFDI | 605 |
| | MN | | VKG | | | |
| BCMA-19 | GFTFSDYY | 674 | YISSSGSTIYYADS | 579 | DLRGAFDI | 606 |
| | MS | | VKG | | | |
| BCMA-20 | GYTVTSHYI | 678 | MINPSGGVTAYS | 584 | EGSGSGWYFDF | 607 |
| | H | | QTLQG | | | |
| BCMA-21 | GGSISSGG | 679 | YIYYSGSTYYNPS | 585 | AGIAARLRGAFDI | 608 |
| | YYWS | | LKS | | | |
| BCMA-22 | GGTFSSYAI | 680 | GIIPIFGTANYAQK | 586 | RGGYQLLRWDVGL | 609 |
| | S | | FQG | | LRSAFDI | |
| BCMA-23 | GDSVSSNS | 681 | RTYYRSKWYSFY | 587 | SSPEGLFLYWFDP | 610 |
| | AAWN | | AISLKS | | | |
| BCMA-24 | GFTFSSYA | 682 | AISGSGGSTYYAD | 588 | VEGSGSLDY | 611 |
| | MS | | SVKG | | | |
| BCMA-25 | GITFSRYP | 683 | GISDSGVSTYYAD | 589 | RAGSEASDI | 612 |
| | MS | | SAKG | | | |
| BCMA-26 | GFTFSSYA | 682 | AISGSGGSTYYAD | 588 | ATYKRELRYYYGM | 613 |
| | MS | | SVKG | | DV | |
| BCMA-27 | GFTFSSYA | 682 | AISGSGGSTYYAD | 588 | ATYKRELRYYYGM | 613 |
| | MS | | SVKG | | DV | |
| BCMA-28 | GFTFDDYA | 670 | GISWNSGSIGYAD | 575 | VGKAVPDV | 614 |
| | MH | | SVKG | | | |
| BCMA-29 | GFTFDDYA | 670 | SINWKGNSLAYG | 590 | HQGVAYYNYAMDV | 615 |
| | MH | | DSVKG | | | |
| BCMA-30 | GFTFSSYA | 682 | AISGSGGSTYYAD | 588 | VVRDGMDV | 616 |
| | MS | | SVKG | | | |
| BCMA-31 | GFTFSSYA | 682 | AISGSGGSTYYAD | 588 | IPQTGTFDY | 617 |
| | MS | | SVKG | | | |
| BCMA-32 | GFTFSSYA | 682 | AISGSGGSTYYAD | 588 | ANYKRELRYYYGM | 618 |
| | MS | | SVKG | | DV | |
| BCMA-33 | GFSFSSYA | 684 | AISGSGGSTYYAD | 588 | ALVGATGAFDI | 619 |
| | MS | | SVKG | | | |
| BCMA-34 | GFTFSSYA | 682 | AISGSGGSTYYAD | 588 | WFGEGFDP | 620 |
| | MS | | SVKG | | | |
| BCMA-35 | GFTFSSYA | 682 | AISGSGGSTYYAD | 588 | VGYDSSGYYRDYY | 621 |
| | MS | | SVKG | | GMDV | |
| BCMA-36 | GFTFSSYA | 682 | AISGSGGSTYYAD | 588 | MGWSSGYLGAFDI | 622 |
| | MS | | SVKG | | | |
| BCMA-37 | GYTFTNFG | 685 | WINTYTGESYFAD | 591 | GEIYYGYDGGFAY | 623 |
| | MN | | DFKG | | | |
| BCMA-38 | GYTFTDYSI | 686 | WINTETREPAYAY | 592 | DYSYAMDY | 624 |
| | N | | DFRG | | | |
| BCMA-39 | GYTFRHYS | 687 | RINTESGVPIYAD | 593 | DYLYSLDF | 625 |
| | MN | | DFKG | | | |
| BCMA-40 | GYTFTHYS | 688 | RINTETGEPLYAD | 594 | DYLYSCDY | 626 |
| | MN | | DFKG | | | |

[0402] In some embodiments, the ABM comprises the CDR sequences of BCMA-1. In some embodiments, the ABM comprises the CDR sequences of BCMA-2. In some embodiments, the ABM comprises the CDR sequences of BCMA-3. In some embodiments, the ABM comprises the CDR sequences of BCMA-4. In some embodiments, the ABM comprises the CDR sequences of BCMA-5. In some embodiments, the ABM comprises the CDR sequences of BCMA-6. In some embodiments, the ABM comprises the CDR sequences of BCMA-7. In some embodiments, the ABM comprises the CDR sequences of BCMA-8. In some embodiments, the ABM comprises the CDR sequences of BCMA-9. In some embodiments, the ABM comprises the CDR sequences of BCMA-10. In some embodiments, the ABM comprises the CDR sequences of BCMA-11. In some embodiments, the ABM comprises the CDR sequences of BCMA-12. In some embodiments, the ABM comprises the CDR sequences of BCMA-13. In some embodiments, the ABM comprises the CDR sequences of BCMA-14. In some embodiments, the ABM comprises the CDR sequences of BCMA-15. In some embodiments, the ABM comprises the CDR sequences of BCMA-16. In some embodiments, the ABM comprises the CDR sequences of BCMA-17. In some embodiments, the ABM comprises the CDR sequences of BCMA-18. In some embodiments, the ABM comprises the CDR sequences of BCMA-19. In some embodiments, the ABM comprises the CDR sequences of BCMA-20. In some embodiments, the ABM comprises the CDR sequences of BCMA-21. In some embodiments, the ABM comprises the CDR sequences of BCMA-22. In some embodiments, the ABM comprises the CDR sequences of BCMA-23. In some embodiments, the ABM comprises the CDR sequences of BCMA-24. In some embodiments, the ABM comprises the CDR sequences of BCMA-25. In some embodiments, the ABM comprises the CDR sequences of BCMA-26. In some embodiments, the ABM comprises the CDR sequences of BCMA-27. In some embodiments, the ABM comprises the CDR sequences of BCMA-28. In some embodiments, the ABM comprises the CDR sequences of BCMA-29. In some embodiments, the ABM comprises the CDR sequences of BCMA-30. In some embodiments, the ABM comprises the CDR sequences of BCMA-31. In some embodiments, the ABM comprises the CDR sequences of BCMA-32. In some embodiments, the ABM comprises the CDR sequences of BCMA-33. In some embodiments, the ABM comprises the CDR sequences of BCMA-34. In some embodiments, the ABM comprises the CDR sequences of BCMA-35. In some embodiments, the ABM comprises the CDR sequences of BCMA-36. In some embodiments, the ABM comprises the CDR sequences of BCMA-37. In some embodiments, the ABM comprises the CDR sequences of BCMA-38. In some embodiments, the ABM comprises the CDR sequences of BCMA-39. In some embodiments, the ABM comprises the CDR sequences of BCMA-40.

[0403] In some embodiments, the CDRs are defined by Kabat numbering, as set forth in Table 12B and 10E. In other embodiments, the CDRs are defined by Chothia numbering, as set forth in Table 12C and 10F. In yet other embodiments, the CDRs are defined by a combination of Kabat and Chothia numbering, as set forth in Table 12D and 10G.

[0404] In some embodiments, the TBMs comprising a ABM that binds to BCMA can comprise the heavy and light chain variable sequences of any of BCMA-1 to BCMA-40.

[0405] In some embodiments, the ABM comprises the heavy and light chain variable sequences of BCMA-1, as set forth in Table 12A. In some embodiments, the ABM comprises the heavy and light chain variable sequences of BCMA-2, as set forth in Table 12A. In some embodiments, the ABM comprises the heavy and light chain variable sequences of BCMA-3, as set forth in Table 12A. In some embodiments, the ABM comprises the heavy and light chain variable sequences of BCMA-4, as set forth in Table 12A. In some embodiments, the ABM comprises the heavy and light chain variable sequences of BCMA-5, as set forth in Table 12A. In some embodiments, the ABM comprises the heavy and light chain variable sequences of BCMA-6, as set forth in Table 12A. In some embodiments, the ABM comprises the heavy and light chain variable sequences of BCMA-7, as set forth in Table 12A. In some embodiments, the ABM comprises the heavy and light chain variable sequences of BCMA-8, as set forth in Table 12A. In some embodiments, the ABM comprises the heavy and light chain variable sequences of BCMA-9, as set forth in Table 12A. In some embodiments, the ABM comprises the heavy and light chain variable sequences of BCMA-10, as set forth in Table 12A. In some embodiments, the ABM comprises the heavy and light chain variable sequences of BCMA-11, as set forth in Table 12A. In some embodiments, the ABM comprises the heavy and light chain variable sequences of BCMA-12, as set forth in Table 12A. In some embodiments, the ABM comprises the heavy and light chain variable sequences of BCMA-13, as set forth in Table 12A. In some embodiments, the ABM comprises the heavy and light chain variable sequences of BCMA-14, as set forth in Table 12A. In some embodiments, the ABM comprises the heavy and light chain variable sequences of BCMA-15, as set forth in Table 12A. In some embodiments, the ABM comprises the heavy and light chain variable sequences of BCMA-16, as set forth in Table 12A. In some embodiments, the ABM comprises the heavy and light chain variable sequences of BCMA-17, as set forth in Table 12A. In some embodiments, the ABM comprises the heavy and light chain variable sequences of BCMA-18, as set forth in Table 12A. In some embodiments, the ABM comprises the heavy and light chain variable sequences of BCMA-19, as set forth in Table 12A. In some embodiments, the ABM comprises the heavy and light chain variable sequences of BCMA-20, as set forth in Table 12A. In some embodiments, the ABM comprises the heavy and light chain variable sequences of BCMA-21, as set forth in Table 12A. In some embodiments, the ABM comprises the heavy and light chain variable sequences of BCMA-22, as set forth in Table 12A.

[0406] In some embodiments, the ABM comprises the heavy and light chain variable sequences of BCMA-23, as set forth in Table 12A. In some embodiments, the ABM comprises the heavy and light chain variable sequences of BCMA-24, as set forth in Table 12A. In some embodiments, the ABM comprises the heavy and light chain variable sequences of BCMA-25, as set forth in Table 12A. In some embodiments, the ABM comprises the heavy and light chain variable sequences of BCMA-26, as set forth in Table 12A. In some embodiments, the ABM comprises the heavy and light chain variable sequences of BCMA-27, as set forth in Table 12A. In some embodiments, the ABM comprises the heavy and light chain variable sequences of BCMA-28, as set forth in Table 12A. In some embodiments, the ABM comprises the heavy and light chain variable sequences of BCMA-29, as set forth in Table 12A. In some embodiments, the ABM comprises the heavy and light chain variable sequences of BCMA-30, as set forth in Table 12A. In some embodiments, the ABM comprises the heavy and light chain variable sequences of BCMA-31, as set forth in Table 12A. In some embodiments, the ABM comprises the heavy and light chain variable sequences of BCMA-32, as set forth in Table 12A. In some embodiments, the ABM comprises the heavy and light chain variable sequences of BCMA-33, as set forth in Table 12A. In some embodiments, the ABM comprises the heavy and light chain variable sequences of BCMA-34, as set forth in Table 12A. In some embodiments, the ABM comprises the heavy and light chain variable sequences of BCMA-35, as set forth in Table 12A. In some embodiments, the ABM comprises the heavy and light chain variable sequences of BCMA-36, as set forth in Table 12A. In some embodiments, the ABM comprises the heavy and light chain variable sequences of BCMA-37, as set forth in Table 12A. In some embodiments, the ABM comprises the heavy and light chain variable sequences of BCMA-38, as set forth in Table 12A. In some embodiments, the ABM comprises the heavy and light chain variable sequences of BCMA-39, as set forth in Table 12A. In some embodiments, the ABM comprises the heavy and light chain variable sequences of BCMA-40, as set forth in Table 12A.

[0407] 6.7.2. CD19

[0408] B cells express cell surface proteins which can be utilized as markers for differentiation and identification. One such human B-cell marker is a CD19 antigen and is found on mature B cells but not on plasma cells. CD19 is expressed during early pre-B cell development and remains until plasma cell differentiation. CD19 is expressed on both normal B cells and malignant B cells whose abnormal growth can lead to B-cell lymphomas. For example, CD19 is expressed on B-cell lineage malignancies, including, but not limited to non-Hodgkin's lymphoma (B-NHL), chronic lymphocytic leukemia, and acute lymphoblastic leukemia.

[0409] In certain aspects, a TBM of the disclosure comprises an ABM3 that specifically binds to CD19. Exemplary CDR and variable domain sequences that can be incorporated into an ABM3 that specifically binds to CD19 are set forth in Table 13 below

TABLE 13
CD19 Binders

| | | | SEQ |
|---|---|---|---|
| | | | ID |
| Name | Domain | Sequence | NO: |
| CD19-H1 | CDR-H1 | DYGVS | 689 |
| CD19-H2A | CDR-H2 | VIWGSETTYYNSALKS | 690 |
| CD19-H2B | CDR-H2 | VIWGSETTYYSSSLKS | 691 |
| CD19-H2C | CDR-H2 | VIWGSETTYYQSSLKS | 692 |
| CD19-H2D | CDR-H2 | VIWGSETTYYNSSLKS | 693 |
| CD19-H3 | CDR-H3 | HYYYGGSYAMDY | 694 |
| CD19-L1 | CDR-L1 | RASQDISKYLN | 695 |
| CD19-L2 | CDR-L2 | HTSRLHS | 696 |
| CD19-L3 | CDR-L3 | QQGNTLPYT | 697 |
| CD19-VHA | VH | EVKLQESGPGLVAPSQSLSVTCTVSGVSLPDYGVSWI | 698 |
| | | RQPPRKGLEWLGVIWGSETTYYNSALKSRLTIIKDNSK | |
| | | SQVFLKMNSLQTDDTAIYYCAKHYYYGGSYAMDYWG | |
| | | QGTSVTVSS | |
| CD19-VHB | VH | QVQLQESGPGLVKPSETLSLTCTVSGVSLPDYGVSWIR | 699 |
| | | QPPGKGLEWIGVIWGSETTYYSSSLKSRVTISKDNSKN | |
| | | QVSLKLSSVTAADTAVYYCAKHYYYGGSYAMDYWGQ | |
| | | GTLVTVSS | |
| CD19-VHC | VH | QVQLQESGPGLVKPSETLSLTCTVSGVSLPDYGVSWIR | 700 |
| | | QPPGKGLEWIGVIWGSETTYYQSSLKSRVTISKDNSKN | |
| | | QVSLKLSSVTAADTAVYYCAKHYYYGGSYAMDYWGQ | |
| | | GTLVTVSS | |
| CD19-VHD | VH | QVQLQESGPGLVKPSETLSLTCTVSGVSLPDYGVSWIR | 701 |
| | | QPPGKGLEWIGVIWGSETTYYNSSLKSRVTISKDNSKN | |
| | | QVSLKLSSVTAADTAVYYCAKHYYYGGSYAMDYWGQ | |
| | | GTLVTVSS | |
| CD19-VLA | VL | DIQMTQTTSSLSASLGDRVTISCRASQDISKYLNWYQQ | 702 |
| | | KPDGTVKLLIYHTSRLHSGVPSRFSGSGSGTDYSLTISN | |
| | | LEQEDIATYFCQQGNTLPYTFGGGTKLEIT | |
| CD19-VLB | VL | EIVMTQSPATLSLSPGERATLSCRASQDISKYLNWYQQ | 703 |
| | | KPGQAPRLLIYHTSRLHSGIPARFSGSGSGTDYTLTISS | |
| | | LQPEDFAVYFCQQGNTLPYTFGQGTKLEIK | |
| CD19-scFv1 | scFv | EIVMTQSPATLSLSPGERATLSCRASQDISKYLNWYQQ | 704 |
| | | KPGQAPRLLIYHTSRLHSGIPARFSGSGSGTDYTLTISS | |
| | | LQPEDFAVYFCQQGNTLPYTFGQGTKLEIKGGGGSGG | |
| | | GGSGGGGSQVQLQESGPGLVKPSETLSLTCTVSGVSL | |
| | | PDYGVSWIRQPPGKGLEWIGVIWGSETTYYSSSLKSR | |
| | | VTISKDNSKNQVSLKLSSVTAADTAVYYCAKHYYYGGS | |
| | | YAMDYWGQGTLVTVSS | |
| CD19-scFv2 | scFv | EIVMTQSPATLSLSPGERATLSCRASQDISKYLNWYQQ | 705 |
| | | KPGQAPRLLIYHTSRLHSGIPARFSGSGSGTDYTLTISS | |
| | | LQPEDFAVYFCQQGNTLPYTFGQGTKLEIKGGGGSGG | |
| | | GGSGGGGSQVQLQESGPGLVKPSETLSLTCTVSGVSL | |
| | | PDYGVSWIRQPPGKGLEWIGVIWGSETTYYQSSLKSR | |
| | | VTISKDNSKNQVSLKLSSVTAADTAVYYCAKHYYYGGS | |
| | | YAMDYWGQGTLVTVSS | |
| CD19-scFv3 | scFv | QVQLQESGPGLVKPSETLSLTCTVSGVSLPDYGVSWIR | 706 |
| | | QPPGKGLEWIGVIWGSETTYYSSSLKSRVTISKDNSKN | |
| | | QVSLKLSSVTAADTAVYYCAKHYYYGGSYAMDYWGQ | |
| | | GTLVTVSSGGGGSGGGGSGGGGSEIVMTQSPATLSLS | |
| | | PGERATLSCRASQDISKYLNWYQQKPGQAPRLLIYHTS | |
| | | RLHSGIPARFSGSGSGTDYTLTISSLQPEDFAVYFCQQ | |
| | | GNTLPYTFGQGTKLEIK | |
| CD19-scFv4 | scFv | QVQLQESGPGLVKPSETLSLTCTVSGVSLPDYGVSWIR | 707 |
| | | QPPGKGLEWIGVIWGSETTYYQSSLKSRVTISKDNSKN | |
| | | QVSLKLSSVTAADTAVYYCAKHYYYGGSYAMDYWGQ | |
| | | GTLVTVSSGGGGSGGGGSGGGGSEIVMTQSPATLSLS | |
| | | PGERATLSCRASQDISKYLNWYQQKPGQAPRLLIYHTS | |
| | | RLHSGIPARFSGSGSGTDYTLTISSLQPEDFAVYFCQQ | |
| | | GNTLPYTFGQGTKLEIK | |
| CD19-scFv5 | scFv | EIVMTQSPATLSLSPGERATLSCRASQDISKYLNWYQQ | 708 |
| | | KPGQAPRLLIYHTSRLHSGIPARFSGSGSGTDYTLTISS | |
| | | LQPEDFAVYFCQQGNTLPYTFGQGTKLEIKGGGGSGG | |
| | | GGSGGGGSGGGGSQVQLQESGPGLVKPSETLSLTCT | |
| | | VSGVSLPDYGVSWIRQPPGKGLEWIGVIWGSETTYYS | |
| | | SSLKSRVTISKDNSKNQVSLKLSSVTAADTAVYYCAKH | |
| | | YYYGGSYAMDYWGQGTLVTVSS | |
| CD19-scFv6 | scFv | EIVMTQSPATLSLSPGERATLSCRASQDISKYLNWYQQ | 709 |
| | | KPGQAPRLLIYHTSRLHSGIPARFSGSGSGTDYTLTISS | |
| | | LQPEDFAVYFCQQGNTLPYTFGQGTKLEIKGGGGSGG | |
| | | GGSGGGGSGGGGSQVQLQESGPGLVKPSETLSLTCT | |
| | | VSGVSLPDYGVSWIRQPPGKGLEWIGVIWGSETTYYQ | |
| | | SSLKSRVTISKDNSKNQVSLKLSSVTAADTAVYYCAKH | |
| | | YYYGGSYAMDYWGQGTLVTVSS | |
| CD19-scFv7 | scFv | QVQLQESGPGLVKPSETLSLTCTVSGVSLPDYGVSWIR | 710 |
| | | QPPGKGLEWIGVIWGSETTYYSSSLKSRVTISKDNSKN | |
| | | QVSLKLSSVTAADTAVYYCAKHYYYGGSYAMDYWGQ | |
| | | GTLVTVSSGGGGSGGGGSGGGGSGGGGSEIVMTQS | |
| | | PATLSLSPGERATLSCRASQDISKYLNVVYQQKPGQAP | |
| | | RLLIYHTSRLHSGIPARFSGSGSGTDYTLTISSLQPEDF | |
| | | AVYFCQQGNTLPYTFGQGTKLEIK | |
| CD19-scFv8 | scFv | QVQLQESGPGLVKPSETLSLTCTVSGVSLPDYGVSWIR | 711 |
| | | QPPGKGLEWIGVIWGSETTYYQSSLKSRVTISKDNSKN | |
| | | QVSLKLSSVTAADTAVYYCAKHYYYGGSYAMDYWGQ | |
| | | GTLVTVSSGGGGSGGGGSGGGGSGGGGSEIVMTQS | |
| | | PATLSLSPGERATLSCRASQDISKYLNWYQQKPGQAP | |
| | | RLLIYHTSRLHSGIPARFSGSGSGTDYTLTISSLQPEDF | |
| | | AVYFCQQGNTLPYTFGQGTKLEIK | |
| CD19-scFv9 | scFv | EIVMTQSPATLSLSPGERATLSCRASQDISKYLNWYQQ | 712 |
| | | KPGQAPRLLIYHTSRLHSGIPARFSGSGSGTDYTLTISS | |
| | | LQPEDFAVYFCQQGNTLPYTFGQGTKLEIKGGGGSGG | |
| | | GGSGGGGSGGGGSQVQLQESGPGLVKPSETLSLTCT | |
| | | VSGVSLPDYGVSWIRQPPGKGLEWIGVIWGSETTYYN | |
| | | SSLKSRVTISKDNSKNQVSLKLSSVTAADTAVYYCAKH | |
| | | YYYGGSYAMDYWGQGTLVTVSS | |
| CD19- | scFv | QVQLQESGPGLVKPSETLSLTCTVSGVSLPDYGVSWIR | 713 |
| scFv10 | | QPPGKGLEWIGVIWGSETTYYNSSLKSRVTISKDNSKN | |
| | | QVSLKLSSVTAADTAVYYCAKHYYYGGSYAMDYWGQ | |
| | | GTLVTVSSGGGGSGGGGSGGGGSGGGGSEIVMTQS | |
| | | PATLSLSPGERATLSCRASQDISKYLNWYQQKPGQAP | |
| | | RLLIYHTSRLHSGIPARFSGSGSGTDYTLTISSLQPEDF | |
| | | AVYFCQQGNTLPYTFGQGTKLEIK | |
| CD19- | scFv | EIVMTQSPATLSLSPGERATLSCRASQDISKYLNWYQQ | 714 |
| scFv11 | | KPGQAPRLLIYHTSRLHSGIPARFSGSGSGTDYTLTISS | |
| | | LQPEDFAVYFCQQGNTLPYTFGQGTKLEIKGGGGSGG | |
| | | GGSGGGGSQVQLQESGPGLVKPSETLSLTCTVSGVSL | |
| | | PDYGVSWIRQPPGKGLEWIGVIWGSETTYYNSSLKSR | |
| | | VTISKDNSKNQVSLKLSSVTAADTAVYYCAKHYYYGGS | |
| | | YAMDYWGQGTLVTVSS | |
| CD19- | scFv | QVQLQESGPGLVKPSETLSLTCTVSGVSLPDYGVSWIR | 715 |
| scFv12 | | QPPGKGLEWIGVIWGSETTYYNSSLKSRVTISKDNSKN | |
| | | QVSLKLSSVTAADTAVYYCAKHYYYGGSYAMDYWGQ | |
| | | GTLVTVSSGGGGSGGGGSGGGGSEIVMTQSPATLSLS | |
| | | PGERATLSCRASQDISKYLNWYQQKPGQAPRLLIYHTS | |
| | | RLHSGIPARFSGSGSGTDYTLTISSLQPEDFAVYFCQQ | |
| | | GNTLPYTFGQGTKLEIK | |

[0410] In certain aspects, the ABM3 comprises heavy chain CDRs having the amino acid sequences of CD19-H1, CD19-H2A, and CD19-H3 as set forth in Table 13 and light chain CDRs having the amino acid sequences of CD19-L1, CD19-L2, and CD19-L3 as set forth in Table 13. In a specific embodiment, the ABM3 comprises a heavy chain variable region having the amino acid sequences of VHA as set forth in Table 13 and a light chain variable region having the amino acid sequences of VLA as set forth in Table 13.

[0411] In other aspects, the ABM3 comprises heavy chain CDRs having the amino acid sequences of CD19-H1, CD19-H2B, and CD19-H3 as set forth in Table 13 and light chain CDRs having the amino acid sequences of CD19-L1, CD19-L2, and CD19-L3 as set forth in Table 13. In a specific embodiment, the ABM3 comprises a heavy chain variable region having the amino acid sequences of VHB as set forth in Table 13 and a light chain variable region having the amino acid sequences of VLB as set forth in Table 13.

[0412] In further aspects, the ABM3 comprises heavy chain CDRs having the amino acid sequences of CD19-H1, CD19-H2C, and CD19-H3 as set forth in Table 13 and light chain CDRs having the amino acid sequences of CD19-L1, CD19-L2, and CD19-L3 as set forth in Table 13. In a specific embodiment, ABM3 comprises a heavy chain variable region having the amino acid sequences of VHC as set forth in Table 13 and a light chain variable region having the amino acid sequences of VLB as set forth in Table 13.

[0413] In further aspects, the ABM3 comprises heavy chain CDRs having the amino acid sequences of CD19-H1, CD19-H2D, and CD19-H3 as set forth in Table 13 and light chain CDRs having the amino acid sequences of CD19-L1, CD19-L2, and CD19-L3 as set forth in Table 13. In a specific embodiment, the ABM3 comprises a heavy chain variable region having the amino acid sequences of VHD as set forth in Table 13 and a light chain variable region having the amino acid sequences of VLB as set forth in Table 13.

[0414] In yet further aspects, the ABM3 is in the form of an scFV. Exemplary anti-CD19 scFvs comprise the amino acid sequence of any one of CD19-scFv1 through CD19-scFv12 as set forth in Table 13.

### 6.8. Nucleic Acids and Host Cells

[0415] In another aspect, the disclosure provides nucleic acids encoding the TBMs of the disclosure. In some embodiments, the TBMs are encoded by a single nucleic acid. In other embodiments, the TBMs are encoded by a plurality (e.g., two, three, four or more) nucleic acids.

[0416] A single nucleic acid can encode a TBM that comprises a single polypeptide chain, a TBM that comprises two or more polypeptide chains, or a portion of a TBM that comprises more than two polypeptide chains (for example, a single nucleic acid can encode two polypeptide chains of a TBM comprising three, four or more polypeptide chains, or three polypeptide chains of a TBM comprising four or more polypeptide chains). For separate control of expression, the open reading frames encoding two or more polypeptide chains can be under the control of separate transcriptional regulatory elements (e.g., promoters and/or enhancers). The open reading frames encoding two or more polypeptides can also be controlled by the same transcriptional regulatory elements, and separated by internal ribosome entry site (IRES) sequences allowing for translation into separate polypeptides.

[0417] In some embodiments, a TBM comprising two or more polypeptide chains is encoded by two or more nucleic acids. The number of nucleic acids encoding a TBM can be equal to or less than the number of polypeptide chains in the TBM (for example, when more than one polypeptide chains are encoded by a single nucleic acid).

[0418] The nucleic acids of the disclosure can be DNA or RNA (e.g., mRNA).

[0419] In another aspect, the disclosure provides host cells and vectors containing the nucleic acids of the disclosure. The nucleic acids may be present in a single vector or separate vectors present in the same host cell or separate host cell, as described in more detail herein below.

[0420] 6.8.1. Vectors

[0421] The disclosure provides vectors comprising nucleotide sequences encoding a TBM or a TBM component described herein. In one embodiment, the vectors comprise nucleotides encoding an immunoglobulin-based ABM described herein. In one embodiment, the vectors comprise nucleotides encoding an Fc domain described herein. In one embodiment, the vectors comprise nucleotides encoding a recombinant non-immunoglobulin based ABM described herein. A vector of the disclosure can encode one or more ABMs, one or more Fc domains, one or more non-immunoglobulin based ABM, or a combination thereof (e.g., when multiple components or sub-components are encoded as a single polypeptide chain). In one embodiment, the vectors comprise the nucleotide sequences described herein. The vectors include, but are not limited to, a virus, plasmid, cosmid, lambda phage or a yeast artificial chromosome (YAC).

[0422] Numerous vector systems can be employed. For example, one class of vectors utilizes DNA elements which are derived from animal viruses such as, for example, bovine papilloma virus, polyoma virus, adenovirus, vaccinia virus, baculovirus, retroviruses (Rous Sarcoma Virus, MMTV or MOMLV) or SV40 virus. Another class of vectors utilizes RNA elements derived from RNA viruses such as Semliki Forest virus, Eastern Equine Encephalitis virus and Flaviviruses.

[0423] Additionally, cells which have stably integrated the DNA into their chromosomes may be selected by introducing one or more markers which allow for the selection of transfected host cells. The marker may provide, for example, prototropy to an auxotrophic host, biocide resistance (e.g., antibiotics), or resistance to heavy metals such as copper, or the like. The selectable marker gene can be either directly linked to the DNA sequences to be expressed, or introduced into the same cell by cotransformation. Additional elements may also be needed for optimal synthesis of mRNA. These elements may include splice signals, as well as transcriptional promoters, enhancers, and termination signals.

[0424] Once the expression vector or DNA sequence containing the constructs has been prepared for expression, the expression vectors may be transfected or introduced into an appropriate host cell. Various techniques may be employed to achieve this, such as, for example, protoplast fusion, calcium phosphate precipitation, electroporation, retroviral transduction, viral transfection, gene gun, lipid based transfection or other conventional techniques. Methods and conditions for culturing the resulting transfected cells and for recovering the expressed polypeptides are known to those skilled in the art, and may be varied or optimized depending upon the specific expression vector and mammalian host cell employed, based upon the present description.

[0425] 6.8.2. Cells

[0426] The disclosure also provides host cells comprising a nucleic acid of the disclosure.

[0427] In one embodiment, the host cells are genetically engineered to comprise one or more nucleic acids described herein.

[0428] In one embodiment, the host cells are genetically engineered by using an expression cassette. The phrase “expression cassette,” refers to nucleotide sequences, which are capable of affecting expression of a gene in hosts compatible with such sequences. Such cassettes may include a promoter, an open reading frame with or without introns, and a termination signal. Additional factors necessary or helpful in effecting expression may also be used, such as, for example, an inducible promoter.

[0429] The disclosure also provides host cells comprising the vectors described herein.

[0430] The cell can be, but is not limited to, a eukaryotic cell, a bacterial cell, an insect cell, or a human cell. Suitable eukaryotic cells include, but are not limited to, Vero cells, HeLa cells, COS cells, CHO cells, HEK293 cells, BHK cells and MDCKII cells. Suitable insect cells include, but are not limited to, Sf9 cells.

### 6.9. Antibody-Drug Conjugates

[0431] The TBMs of the disclosure can be conjugated, e.g., via a linker, to a drug moiety. Such conjugates are referred to herein as antibody-drug conjugates (or “ADCs”) for convenience, notwithstanding the fact that one or more (or all) of the ABMs might be based on non-immunoglobulin scaffolds.

[0432] In certain aspects, the drug moiety exerts a cytotoxic or cytostatic activity. In one embodiment, the drug moiety is chosen from a maytansinoid, a kinesin-like protein KIF11 inhibitor, a V-ATPase (vacuolar-type H+-ATPase) inhibitor, a pro-apoptotic agent, a Bcl2 (B-cell lymphoma 2) inhibitor, an MCL1 (myeloid cell leukemia 1) inhibitor, a HSP90 (heat shock protein 90) inhibitor, an IAP (inhibitor of apoptosis) inhibitor, an mTOR (mechanistic target of rapamycin) inhibitor, a microtubule stabilizer, a microtubule destabilizer, an auristatin, a dolastatin, a MetAP (methionine aminopeptidase), a CRM1 (chromosomal maintenance 1) inhibitor, a DPPIV (dipeptidyl peptidase IV) inhibitor, a proteasome inhibitor, an inhibitor of a phosphoryl transfer reaction in mitochondria, a protein synthesis inhibitor, a kinase inhibitor, a CDK2 (cyclin-dependent kinase 2) inhibitor, a CDK9 (cyclin-dependent kinase 9) inhibitor, a kinesin inhibitor, an HDAC (histone deacetylase) inhibitor, a DNA damaging agent, a DNA alkylating agent, a DNA intercalator, a DNA minor groove binder, a RNA polymerase inhibitor, a topoisomerase inhibitor, or a DHFR (dihydrofolate reductase) inhibitor.

[0433] In one embodiment, the linker is chosen from a cleavable linker, a non-cleavable linker, a hydrophilic linker, a procharged linker, or a dicarboxylic acid based linker.

[0434] In specific embodiments, the ADCs are compounds according to structural formula (I):

[D-L-XY]ₙ-Ab

or salts thereof, where each “D” represents, independently of the others, a cytotoxic and/or cytostatic agent (“drug”); each “L” represents, independently of the others, a linker; “Ab” represents a TBM described herein; each “XY” represents a linkage formed between a functional group R^{x} on the linker and a “complementary” functional group R^{y} on the antibody, and n represents the number of drugs linked to, or drug-to-antibody ratio (DAR), of the ADC.

[0435] Specific embodiments of the various antibodies (Ab) that can comprise the ADCs include the various embodiments of TBMs described above.

[0436] In some specific embodiments of the ADCs and/or salts of structural formula (I), each D is the same and/or each L is the same.

[0437] Specific embodiments of cytotoxic and/or cytostatic agents (D) and linkers (L) that can comprise the ADCs of the disclosure, as well as the number of cytotoxic and/or cytostatic agents linked to the ADCs, are described in more detail below.

[0438] 6.9.1. Cytotoxic and/or Cytostatic Agents

[0439] The cytotoxic and/or cytostatic agents may be any agents known to inhibit the growth and/or replication of and/or kill cells, and in particular cancer and/or tumor cells. Numerous agents having cytotoxic and/or cytostatic properties are known in the literature. Non-limiting examples of classes of cytotoxic and/or cytostatic agents include, by way of example and not limitation, radionuclides, alkylating agents, topoisomerase I inhibitors, topoisomerase II inhibitors, DNA intercalating agents (e.g., groove binding agents such as minor groove binders), RNA/DNA antimetabolites, cell cycle modulators, kinase inhibitors, protein synthesis inhibitors, histone deacetylase inhibitors, mitochondria inhibitors, and antimitotic agents.

[0440] Specific non-limiting examples of agents within certain of these various classes are provided below.

[0441] Alkylating Agents: asaley ((L-Leucine, N—[N-acetyl-4-[bis-(2-chloroethyl)amino]-DL-phenylalanyl]-, ethylester; NSC 167780; CAS Registry No. 3577897)); AZQ ((1,4-cyclohexadiene-1,4-dicarbamic acid, 2,5-bis(1-aziridinyl)-3,6-dioxo-, diethyl ester; NSC 182986; CAS Registry No. 57998682)); BCNU ((N,N′-Bis(2-chloroethyl)-N-nitrosourea; NSC 409962; CAS Registry No. 154938)); busulfan (1,4-butanediol dimethanesulfonate; NSC 750; CAS Registry No. 55981); (carboxyphthalato)platinum (NSC 27164; CAS Registry No. 65296813); CBDCA ((cis-(1,1-cyclobutanedicarboxylato)diammineplatinum(II)); NSC 241240; CAS Registry No. 41575944)); CCNU ((N-(2-chloroethyl)-N′-cyclohexyl-N-nitrosourea; NSC 79037; CAS Registry No. 13010474)); CHIP (iproplatin; NSC 256927); chlorambucil (NSC 3088; CAS Registry No. 305033); chlorozotocin ((2-[[[(2-chloroethyl) nitrosoamino]carbonyl]amino]-2-deoxy-D-glucopyranose; NSC 178248; CAS Registry No. 54749905)); cis-platinum (cisplatin; NSC 119875; CAS Registry No. 15663271); clomesone (NSC 338947; CAS Registry No. 88343720); cyanomorpholinodoxorubicin (NCS 357704; CAS Registry No. 88254073); cyclodisone (NSC 348948; CAS Registry No. 99591738); dianhydrogalactitol (5,6-diepoxydulcitol; NSC 132313; CAS Registry No. 23261203); fluorodopan ((5-[(2-chloroethyl)-(2-fluoroethyl)amino]-6-methyl-uracil; NSC 73754; CAS Registry No. 834913); hepsulfam (NSC 329680; CAS Registry No. 96892578); hycanthone (NSC 142982; CAS Registry No. 23255938); melphalan (NSC 8806; CAS Registry No. 3223072); methyl CCNU ((1-(2-chloroethyl)-3-(trans-4-methylcyclohexane)-1-nitrosourea; NSC 95441; 13909096); mitomycin C (NSC 26980; CAS Registry No. 50077); mitozolamide (NSC 353451; CAS Registry No. 85622953); nitrogen mustard ((bis(2-chloroethyl)methylamine hydrochloride; NSC 762; CAS Registry No. 55867); PCNU ((1-(2-chloroethyl)-3-(2,6-dioxo-3-piperidyl)-1-nitrosourea; NSC 95466; CAS Registry No. 13909029)); piperazine alkylator ((1-(2-chloroethyl)-4-(3-chloropropyl)-piperazine dihydrochloride; NSC 344007)); piperazinedione (NSC 135758; CAS Registry No. 41109802); pipobroman ((N,N-bis(3-bromopropionyl) piperazine; NSC 25154; CAS Registry No. 54911)); porfiromycin (N-methylmitomycin C; NSC 56410; CAS Registry No. 801525); spirohydantoin mustard (NSC 172112; CAS Registry No. 56605164); teroxirone (triglycidylisocyanurate; NSC 296934; CAS Registry No. 2451629); tetraplatin (NSC 363812; CAS Registry No. 62816982); thio-tepa (N,N′,N″-tri-1,2-ethanediylthio phosphoramide; NSC 6396; CAS Registry No. 52244); triethylenemelamine (NSC 9706; CAS Registry No. 51183); uracil nitrogen mustard (desmethyldopan; NSC 34462; CAS Registry No. 66751); Yoshi-864 ((bis(3-mesyloxy propyl)amine hydrochloride; NSC 102627; CAS Registry No. 3458228).

[0442] Topoisomerase I Inhibitors: camptothecin (NSC 94600; CAS Registry No. 7689-03-4); various camptothecin derivatives and analogs (for example, NSC 100880, NSC 603071, NSC 107124, NSC 643833, NSC 629971, NSC 295500, NSC 249910, NSC 606985, NSC 74028, NSC 176323, NSC 295501, NSC 606172, NSC 606173, NSC 610458, NSC 618939, NSC 610457, NSC 610459, NSC 606499, NSC 610456, NSC 364830, and NSC 606497); morpholinisoxorubicin (NSC 354646; CAS Registry No. 89196043); SN-38 (NSC 673596; CAS Registry No. 86639-52-3).

[0443] Topoisomerase II Inhibitors: doxorubicin (NSC 123127; CAS Registry No. 25316409); amonafide (benzisoquinolinedione; NSC 308847; CAS Registry No. 69408817); m-AMSA ((4′-(9-acridinylamino)-3′-methoxymethanesulfonanilide; NSC 249992; CAS Registry No. 51264143)); anthrapyrazole derivative ((NSC 355644); etoposide (VP-16; NSC 141540; CAS Registry No. 33419420); pyrazoloacridine ((pyrazolo[3,4,5-kl]acridine-2(6H)-propanamine, 9-methoxy-N, N-dimethyl-5-nitro-, monomethanesulfonate; NSC 366140; CAS Registry No. 99009219); bisantrene hydrochloride (NSC 337766; CAS Registry No. 71439684); daunorubicin (NSC 821151; CAS Registry No. 23541506); deoxydoxorubicin (NSC 267469; CAS Registry No. 63950061); mitoxantrone (NSC 301739; CAS Registry No. 70476823); menogaril (NSC 269148; CAS Registry No. 71628961); N,N-dibenzyl daunomycin (NSC 268242; CAS Registry No. 70878512); oxanthrazole (NSC 349174; CAS Registry No. 105118125); rubidazone (NSC 164011; CAS Registry No. 36508711); teniposide (VM-26; NSC 122819; CAS Registry No. 29767202).

[0444] DNA Intercalating Agents: anthramycin (CAS Registry No. 4803274); chicamycin A (CAS Registry No. 89675376); tomaymycin (CAS Registry No. 35050556); DC-81 (CAS Registry No. 81307246); sibiromycin (CAS Registry No. 12684332); pyrrolobenzodiazepine derivative (CAS Registry No. 945490095); SGD-1882 ((S)-2-(4-aminophenyl)-7-methoxy-8-(3-4(S)-7-methoxy-2-(4-methoxyphenyl)-5-oxo-5,11a-dihydro-1H-benzo[e]pyrrolo[1,2-a][1,4]diazepin-8-yl)oxy)propox-y)-1H-benzo[e]pyrrolo[1,2-a][1,4]diazepin-5(11aH)-one); SG2000 (SJG-136; (11aS,11a′S)-8,8′-(propane-1,3-diylbis(oxy))bis(7-methoxy-2-methylene-2,3-dihydro-1H-benzo[e]pyrrolo[1,2-a][1,4]diazepin-5(11aH)-one); NSC 694501; CAS Registry No. 232931576).

[0445] RNA/DNA Antimetabolites: L-alanosine (NSC 153353; CAS Registry No. 59163416); 5-azacytidine (NSC 102816; CAS Registry No. 320672); 5-fluorouracil (NSC 19893; CAS Registry No. 51218); acivicin (NSC 163501; CAS Registry No. 42228922); aminopterin derivative N-[2-chloro-5-[[(2,4-diamino-5-methyl-6-quinazolinyl)methyl]amino]benzoyl-]L-aspartic acid (NSC 132483); aminopterin derivative N44-[[(2,4-diamino-5-ethyl-6-quinazolinyl)methyl]amino]benzoyl]L-asparti-c acid (NSC 184692); aminopterin derivative N-[2-chloro-4-[[(2,4-diamino-6-pteridinyl)methyl]amino]benzoyl]L-aspartic acid monohydrate (NSC 134033); an antifo ((N^{α}-(4-amino-4-deoxypteroyl)-N⁷-hemiphthaloyl-L-ornithin-e; NSC 623017)); Baker's soluble antifol (NSC 139105; CAS Registry No. 41191042); dichlorallyl lawsone ((2-(3,3-dichloroallyl)-3-hydroxy-1,4-naphthoquinone; NSC 126771; CAS Registry No. 36417160); brequinar (NSC 368390; CAS Registry No. 96201886); ftorafur ((pro-drug; 5-fluoro-1-(tetrahydro-2-furyl)-uracil; NSC 148958; CAS Registry No. 37076689); 5,6-dihydro-5-azacytidine (NSC 264880; CAS Registry No. 62402317); methotrexate (NSC 740; CAS Registry No. 59052); methotrexate derivative (N-[[4-[[(2,4-diamino-6-pteridinyl)methyl]methylamino]-1-naphthalenyl]car-bonyl]L-glutamic acid; NSC 174121); PALA ((N-(phosphonoacetyl)-L-aspartate; NSC 224131; CAS Registry No. 603425565); pyrazofurin (NSC 143095; CAS Registry No. 30868305); trimetrexate (NSC 352122; CAS Registry No. 82952645).

[0446] DNA Antimetabolites: 3-HP (NSC 95678; CAS Registry No. 3814797); 2′-deoxy-5-fluorouridine (NSC 27640; CAS Registry No. 50919); 5-HP (NSC 107392; CAS Registry No. 19494894); α-TGDR (α-2′-deoxy-6-thioguanosine; NSC 71851 CAS Registry No. 2133815); aphidicolin glycinate (NSC 303812; CAS Registry No. 92802822); ara C (cytosine arabinoside; NSC 63878; CAS Registry No. 69749); 5-aza-2′-deoxycytidine (NSC 127716; CAS Registry No. 2353335); β-TGDR (β-2′-deoxy-6-thioguanosine; NSC 71261; CAS Registry No. 789617); cyclocytidine (NSC 145668; CAS Registry No. 10212256); guanazole (NSC 1895; CAS Registry No. 1455772); hydroxyurea (NSC 32065; CAS Registry No. 127071); inosine glycodialdehyde (NSC 118994; CAS Registry No. 23590990); macbecin II (NSC 330500; CAS Registry No. 73341738); pyrazoloimidazole (NSC 51143; CAS Registry No. 6714290); thioguanine (NSC 752; CAS Registry No. 154427); thiopurine (NSC 755; CAS Registry No. 50442).

[0447] Cell Cycle Modulators: silibinin (CAS Registry No. 22888-70-6); epigallocatechin gallate (EGCG; CAS Registry No. 989515); procyanidin derivatives (e.g., procyanidin A1 [CAS Registry No. 103883030], procyanidin B1 [CAS Registry No. 20315257], procyanidin B4 [CAS Registry No. 29106512], arecatannin B1 [CAS Registry No. 79763283]); isoflavones (e.g., genistein [4′,5,7-trihydroxyisoflavone; CAS Registry No. 446720], daidzein [4′,7-dihydroxyisoflavone, CAS Registry No. 486668]; indole-3-carbinol (CAS Registry No. 700061); quercetin (NSC 9219; CAS Registry No. 117395); estramustine (NSC 89201; CAS Registry No. 2998574); nocodazole (CAS Registry No. 31430189); podophyllotoxin (CAS Registry No. 518285); vinorelbine tartrate (NSC 608210; CAS Registry No. 125317397); cryptophycin (NSC 667642; CAS Registry No. 124689652).

[0448] Kinase Inhibitors: afatinib (CAS Registry No. 850140726); axitinib (CAS Registry No. 319460850); ARRY-438162 (binimetinib) (CAS Registry No. 606143899); bosutinib (CAS Registry No. 380843754); cabozantinib (CAS Registry No. 1140909483); ceritinib (CAS Registry No. 1032900256); crizotinib (CAS Registry No. 877399525); dabrafenib (CAS Registry No. 1195765457); dasatinib (NSC 732517; CAS Registry No. 302962498); erlotinib (NSC 718781; CAS Registry No. 183319699); everolimus (NSC 733504; CAS Registry No. 159351696); fostamatinib (NSC 745942; CAS Registry No. 901119355); gefitinib (NSC 715055; CAS Registry No. 184475352); ibrutinib (CAS Registry No. 936563961); imatinib (NSC 716051; CAS Registry No. 220127571); lapatinib (CAS Registry No. 388082788); lenvatinib (CAS Registry No. 857890392); mubritinib (CAS 366017096); nilotinib (CAS Registry No. 923288953); nintedanib (CAS Registry No. 656247175); palbociclib (CAS Registry No. 571190302); pazopanib (NSC 737754; CAS Registry No. 635702646); pegaptanib (CAS Registry No. 222716861); ponatinib (CAS Registry No. 1114544318); rapamycin (NSC 226080; CAS Registry No. 53123889); regorafenib (CAS Registry No. 755037037); AP 23573 (ridaforolimus) (CAS Registry No. 572924540); INCB018424 (ruxolitinib) (CAS Registry No. 1092939177); ARRY-142886 (selumetinib) (NSC 741078; CAS Registry No. 606143-52-6); sirolimus (NSC 226080; CAS Registry No. 53123889); sorafenib (NSC 724772; CAS Registry No. 475207591); sunitinib (NSC 736511; CAS Registry No. 341031547); tofacitinib (CAS Registry No. 477600752); temsirolimus (NSC 683864; CAS Registry No. 163635043); trametinib (CAS Registry No. 871700173); vandetanib (CAS Registry No. 443913733); vemurafenib (CAS Registry No. 918504651); SU6656 (CAS Registry No. 330161870); CEP-701 (lesaurtinib) (CAS Registry No. 111358884); XL019 (CAS Registry No. 945755566); PD-325901 (CAS Registry No. 391210109); PD-98059 (CAS Registry No. 167869218); ATP-competitive TORC1/TORC2 inhibitors including PI-103 (CAS Registry No. 371935749), PP242 (CAS Registry No. 1092351671), PP30 (CAS Registry No. 1092788094), Torin 1 (CAS Registry No. 1222998368), LY294002 (CAS Registry No. 154447366), XL-147 (CAS Registry No. 934526893), CAL-120 (CAS Registry No. 870281348), ETP-45658 (CAS Registry No. 1198357797), PX 866 (CAS Registry No. 502632668), GDC-0941 (CAS Registry No. 957054307), BGT226 (CAS Registry No. 1245537681), BEZ235 (CAS Registry No. 915019657), XL-765 (CAS Registry No. 934493762).

[0449] Protein Synthesis Inhibitors: acriflavine (CAS Registry No. 65589700); amikacin (NSC 177001; CAS Registry No. 39831555); arbekacin (CAS Registry No. 51025855); astromicin (CAS Registry No. 55779061); azithromycin (NSC 643732; CAS Registry No. 83905015); bekanamycin (CAS Registry No. 4696768); chlortetracycline (NSC 13252; CAS Registry No. 64722); clarithromycin (NSC 643733; CAS Registry No. 81103119); clindamycin (CAS Registry No. 18323449); clomocycline (CAS Registry No. 1181540); cycloheximide (CAS Registry No. 66819); dactinomycin (NSC 3053; CAS Registry No. 50760); dalfopristin (CAS Registry No. 112362502); demeclocycline (CAS Registry No. 127333); dibekacin (CAS Registry No. 34493986); dihydrostreptomycin (CAS Registry No. 128461); dirithromycin (CAS Registry No. 62013041); doxycycline (CAS Registry No. 17086281); emetine (NSC 33669; CAS Registry No. 483181); erythromycin (NSC 55929; CAS Registry No. 114078); flurithromycin (CAS Registry No. 83664208); framycetin (neomycin B; CAS Registry No. 119040); gentamycin (NSC 82261; CAS Registry No. 1403663); glycylcyclines, such as tigecycline (CAS Registry No. 220620097); hygromycin B (CAS Registry No. 31282049); isepamicin (CAS Registry No. 67814760); josamycin (NSC 122223; CAS Registry No. 16846245); kanamycin (CAS Registry No. 8063078); ketolides such as telithromycin (CAS Registry No. 191114484), cethromycin (CAS Registry No. 205110481), and solithromycin (CAS Registry No. 760981837); lincomycin (CAS Registry No. 154212); lymecycline (CAS Registry No. 992212); meclocycline (NSC 78502; CAS Registry No. 2013583); metacycline (rondomycin; NSC 356463; CAS Registry No. 914001); midecamycin (CAS Registry No. 35457808); minocycline (NSC 141993; CAS Registry No. 10118908); miocamycin (CAS Registry No. 55881077); neomycin (CAS Registry No. 119040); netilmicin (CAS Registry No. 56391561); oleandomycin (CAS Registry No. 3922905); oxazolidinones, such as eperezolid (CAS Registry No. 165800044), linezolid (CAS Registry No. 165800033), posizolid (CAS Registry No. 252260029), radezolid (CAS Registry No. 869884786), ranbezolid (CAS Registry No. 392659380), sutezolid (CAS Registry No. 168828588), tedizolid (CAS Registry No. 856867555); oxytetracycline (NSC 9169; CAS Registry No. 2058460); paromomycin (CAS Registry No. 7542372); penimepicycline (CAS Registry No. 4599604); peptidyl transferase inhibitors, e.g., chloramphenicol (NSC 3069; CAS Registry No. 56757) and derivatives such as azidamfenicol (CAS Registry No. 13838089), florfenicol (CAS Registry No. 73231342), and thiamphenicol (CAS Registry No. 15318453), and pleuromutilins such as retapamulin (CAS Registry No. 224452668), tiamulin (CAS Registry No. 55297955), valnemulin (CAS Registry No. 101312929); pirlimycin (CAS Registry No. 79548735); puromycin (NSC 3055; CAS Registry No. 53792); quinupristin (CAS Registry No. 120138503); ribostamycin (CAS Registry No. 53797356); rokitamycin (CAS Registry No. 74014510); rolitetracycline (CAS Registry No. 751973); roxithromycin (CAS Registry No. 80214831); sisomicin (CAS Registry No. 32385118); spectinomycin (CAS Registry No. 1695778); spiramycin (CAS Registry No. 8025818); streptogramins such as pristinamycin (CAS Registry No. 270076603), quinupristin/dalfopristin (CAS Registry No. 126602899), and virginiamycin (CAS Registry No. 11006761); streptomycin (CAS Registry No. 57921); tetracycline (NSC 108579; CAS Registry No. 60548); tobramycin (CAS Registry No. 32986564); troleandomycin (CAS Registry No. 2751099); tylosin (CAS Registry No. 1401690); verdamicin (CAS Registry No. 49863481).

[0450] Histone Deacetylase Inhibitors: abexinostat (CAS Registry No. 783355602); belinostat (NSC 726630; CAS Registry No. 414864009); chidamide (CAS Registry No. 743420022); entinostat (CAS Registry No. 209783802); givinostat (CAS Registry No. 732302997); mocetinostat (CAS Registry No. 726169739); panobinostat (CAS Registry No. 404950807); quisinostat (CAS Registry No. 875320299); resminostat (CAS Registry No. 864814880); romidepsin (CAS Registry No. 128517077); sulforaphane (CAS Registry No. 4478937); thioureidobutyronitrile (Kevetrin™; CAS Registry No. 6659890); valproic acid (NSC 93819; CAS Registry No. 99661); vorinostat (NSC 701852; CAS Registry No. 149647789); ACY-1215 (rocilinostat; CAS Registry No. 1316214524); CUDC-101 (CAS Registry No. 1012054599); CHR-2845 (tefinostat; CAS Registry No. 914382608); CHR-3996 (CAS Registry No. 1235859138); 4SC-202 (CAS Registry No. 910462430); CG200745 (CAS Registry No. 936221339); SB939 (pracinostat; CAS Registry No. 929016966).

[0451] Mitochondria Inhibitors: pancratistatin (NSC 349156; CAS Registry No. 96281311); rhodamine-123 (CAS Registry No. 63669709); edelfosine (NSC 324368; CAS Registry No. 70641519); d-alpha-tocopherol succinate (NSC 173849; CAS Registry No. 4345033); compound 11β (CAS Registry No. 865070377); aspirin (NSC 406186; CAS Registry No. 50782); ellipticine (CAS Registry No. 519233); berberine (CAS Registry No. 633658); cerulenin (CAS Registry No. 17397896); GX015-070 (Obatoclax®; 1H-Indole, 2-(2-((3,5-dimethyl-1H-pyrrol-2-yl)methylene)-3-methoxy-2H-pyrrol-5-yl)-; NSC 729280; CAS Registry No. 803712676); celastrol (tripterine; CAS Registry No. 34157830); metformin (NSC 91485; CAS Registry No. 1115704); Brilliant green (NSC 5011; CAS Registry No. 633034); ME-344 (CAS Registry No. 1374524556).

[0452] Antimitotic Agents: allocolchicine (NSC 406042); auristatins, such as MMAE (monomethyl auristatin E; CAS Registry No. 474645-27-7) and MMAF (monomethyl auristatin F; CAS Registry No. 745017-94-1; halichondrin B (NSC 609395); colchicine (NSC 757; CAS Registry No. 64868); cholchicine derivative (N-benzoyl-deacetyl benzamide; NSC 33410; CAS Registry No. 63989753); dolastatin 10 (NSC 376128; CAS Registry No 110417-88-4); maytansine (NSC 153858; CAS Registry No. 35846-53-8); rhozoxin (NSC 332598; CAS Registry No. 90996546); taxol (NSC 125973; CAS Registry No. 33069624); taxol derivative ((2′-N-[3-(dimethylamino)propyl]glutaramate taxol; NSC 608832); thiocolchicine (3-demethylthiocolchicine; NSC 361792); trityl cysteine (NSC 49842; CAS Registry No. 2799077); vinblastine sulfate (NSC 49842; CAS Registry No. 143679); vincristine sulfate (NSC 67574; CAS Registry No. 2068782).

[0453] Any of these agents that include or that may be modified to include a site of attachment to a TBM may be included in the ADCs disclosed herein.

[0454] In a specific embodiment, the cytotoxic and/or cytostatic agent is an antimitotic agent.

[0455] In another specific embodiment, the cytotoxic and/or cytostatic agent is an auristatin, for example, monomethyl auristatin E (“MMAE:) or monomethyl auristatin F (“MMAF”).

[0456] 6.9.2. ADC Linkers

[0457] In the ADCs of the disclosure, the cytotoxic and/or cytostatic agents are linked to the TBM by way of ADC linkers. The ADC linker linking a cytotoxic and/or cytostatic agent to the TBM of an ADC may be short, long, hydrophobic, hydrophilic, flexible or rigid, or may be composed of segments that each independently have one or more of the above-mentioned properties such that the linker may include segments having different properties. The linkers may be polyvalent such that they covalently link more than one agent to a single site on the TBM, or monovalent such that covalently they link a single agent to a single site on the TBM.

[0458] As will be appreciated by skilled artisans, the ADC linkers link cytotoxic and/or cytostatic agents to the TBM by forming a covalent linkage to the cytotoxic and/or cytostatic agent at one location and a covalent linkage to the TBM at another. The covalent linkages are formed by reaction between functional groups on the ADC linker and functional groups on the agents and TBM. As used herein, the expression “ADC linker” is intended to include (i) unconjugated forms of the ADC linker that include a functional group capable of covalently linking the ADC linker to a cytotoxic and/or cytostatic agent and a functional group capable of covalently linking the ADC linker to a TBM; (ii) partially conjugated forms of the ADC linker that include a functional group capable of covalently linking the ADC linker to a TBM and that is covalently linked to a cytotoxic and/or cytostatic agent, or vice versa; and (iii) fully conjugated forms of the ADC linker that are covalently linked to both a cytotoxic and/or cytostatic agent and a TBM. In some specific embodiments of ADC linkers and ADCs of the disclosure, as well as synthons used to conjugate linker-agents to TBMs, moieties comprising the functional groups on the ADC linker and covalent linkages formed between the ADC linker and TBM are specifically illustrated as R, and XY, respectively.

[0459] The ADC linkers are preferably, but need not be, chemically stable to conditions outside the cell, and may be designed to cleave, immolate and/or otherwise specifically degrade inside the cell. Alternatively, ADC linkers that are not designed to specifically cleave or degrade inside the cell may be used. Choice of stable versus unstable ADC linker may depend upon the toxicity of the cytotoxic and/or cytostatic agent. For agents that are toxic to normal cells, stable linkers are preferred. Agents that are selective or targeted and have lower toxicity to normal cells may utilize, chemical stability of the ADC linker to the extracellular milieu is less important. A wide variety of ADC linkers useful for linking drugs to TBMs in the context of ADCs are known in the art. Any of these ADC linkers, as well as other ADC linkers, may be used to link the cytotoxic and/or cytostatic agents to the TBM of the ADCs of the disclosure.

[0460] Exemplary polyvalent ADC linkers that may be used to link many cytotoxic and/or cytostatic agents to a single TBM molecule are described, for example, in WO 2009/073445; WO 2010/068795; WO 2010/138719; WO 2011/120053; WO 2011/171020; WO 2013/096901; WO 2014/008375; WO 2014/093379; WO 2014/093394; WO 2014/093640, the content of which are incorporated herein by reference in their entireties. For example, the Fleximer linker technology developed by Mersana et al. has the potential to enable high-DAR ADCs with good physicochemical properties. As shown below, the Mersana technology is based on incorporating drug molecules into a solubilizing poly-acetal backbone via a sequence of ester bonds. The methodology renders highly-loaded ADCs (DAR up to 20) while maintaining good physicochemical properties.

[0461] Additional examples of dendritic type linkers can be found in US 2006/116422; US 2005/271615; de Groot et al., 2003, Angew. Chem. Int. Ed. 42:4490-4494; Amir et al., 2003, Angew. Chem. Int. Ed. 42:4494-4499; Shamis et al., 2004, J. Am. Chem. Soc. 126:1726-1731; Sun et al., 2002, Bioorganic & Medicinal Chemistry Letters 12:2213-2215; Sun et al., 2003, Bioorganic & Medicinal Chemistry 11:1761-1768; King et al., 2002, Tetrahedron Letters 43:1987-1990, each of which is incorporated herein by reference.

[0462] Exemplary monovalent ADC linkers that may be used are described, for example, in Nolting, 2013, Antibody-Drug Conjugates, Methods in Molecular Biology 1045:71-100; Kitson et al., 2013, CROs-MOs—Chemica-ggi—Chemistry Today 31(4):30-38; Ducry et al., 2010, Bioconjugate Chem. 21:5-13; Zhao et al., 2011, J. Med. Chem. 54:3606-3623; U.S. Pat. Nos. 7,223,837; 8,568,728; 8,535,678; and WO2004010957, each of which is incorporated herein by reference.

[0463] By way of example and not limitation, some cleavable and noncleavable ADC linkers that may be included in the ADCs of the disclosure are described below.

[0464] 6.9.2.1. Cleavable ADC Linkers

[0465] In certain embodiments, the ADC linker selected is cleavable in vivo. Cleavable ADC linkers may include chemically or enzymatically unstable or degradable linkages. Cleavable ADC linkers generally rely on processes inside the cell to liberate the drug, such as reduction in the cytoplasm, exposure to acidic conditions in the lysosome, or cleavage by specific proteases or other enzymes within the cell. Cleavable ADC linkers generally incorporate one or more chemical bonds that are either chemically or enzymatically cleavable while the remainder of the ADC linker is noncleavable. In certain embodiments, an ADC linker comprises a chemically labile group such as hydrazone and/or disulfide groups. Linkers comprising chemically labile groups exploit differential properties between the plasma and some cytoplasmic compartments. The intracellular conditions to facilitate drug release for hydrazone containing ADC linkers are the acidic environment of endosomes and lysosomes, while the disulfide containing ADC linkers are reduced in the cytosol, which contains high thiol concentrations, e.g., glutathione. In certain embodiments, the plasma stability of an ADC linker comprising a chemically labile group may be increased by introducing steric hindrance using substituents near the chemically labile group.

[0466] Acid-labile groups, such as hydrazone, remain intact during systemic circulation in the blood's neutral pH environment (pH 7.3-7.5) and undergo hydrolysis and release the drug once the ADC is internalized into mildly acidic endosomal (pH 5.0-6.5) and lysosomal (pH 4.5-5.0) compartments of the cell. This pH dependent release mechanism has been associated with nonspecific release of the drug. To increase the stability of the hydrazone group of the ADC linker, the ADC linker may be varied by chemical modification, e.g., substitution, allowing tuning to achieve more efficient release in the lysosome with a minimized loss in circulation.

[0467] Hydrazone-containing ADC linkers may contain additional cleavage sites, such as additional acid-labile cleavage sites and/or enzymatically labile cleavage sites. ADCs including exemplary hydrazone-containing ADC linkers include the following structures:

[chemical structure]

wherein D and Ab represent the cytotoxic and/or cytostatic agent (drug) and Ab, respectively, and n represents the number of drug-ADC linkers linked to the TBM. In certain ADC linkers such as linker (Ig), the ADC linker comprises two cleavable groups—a disulfide and a hydrazone moiety. For such ADC linkers, effective release of the unmodified free drug requires acidic pH or disulfide reduction and acidic pH. Linkers such as (Ih) and (Ii) have been shown to be effective with a single hydrazone cleavage site.

[0468] Additional ADC linkers which remain intact during systemic circulation and undergo hydrolysis and release the drug when the ADC is internalized into acidic cellular compartments include carbonates. Such ADC linkers can be useful in cases where the cytotoxic and/or cytostatic agent can be covalently attached through an oxygen.

[0469] Other acid-labile groups that may be included in ADC linkers include cis-aconityl-containing ADC linkers. cis-Aconityl chemistry uses a carboxylic acid juxtaposed to an amide bond to accelerate amide hydrolysis under acidic conditions.

[0470] Cleavable ADC linkers may also include a disulfide group. Disulfides are thermodynamically stable at physiological pH and are designed to release the drug upon internalization inside cells, wherein the cytosol provides a significantly more reducing environment compared to the extracellular environment. Scission of disulfide bonds generally requires the presence of a cytoplasmic thiol cofactor, such as (reduced) glutathione (GSH), such that disulfide-containing ADC linkers are reasonably stable in circulation, selectively releasing the drug in the cytosol. The intracellular enzyme protein disulfide isomerase, or similar enzymes capable of cleaving disulfide bonds, may also contribute to the preferential cleavage of disulfide bonds inside cells. GSH is reported to be present in cells in the concentration range of 0.5-10 mM compared with a significantly lower concentration of GSH or cysteine, the most abundant low-molecular weight thiol, in circulation at approximately 5 Tumor cells, where irregular blood flow leads to a hypoxic state, result in enhanced activity of reductive enzymes and therefore even higher glutathione concentrations. In certain embodiments, the in vivo stability of a disulfide-containing ADC linker may be enhanced by chemical modification of the ADC linker, e.g., use of steric hindrance adjacent to the disulfide bond.

[0471] ADCs including exemplary disulfide-containing ADC linkers include the following structures:

[chemical structure]

wherein D and Ab represent the drug and TBM, respectively, n represents the number of drug-ADC linkers linked to the TBM and R is independently selected at each occurrence from hydrogen or alkyl, for example. In certain embodiments, increasing steric hindrance adjacent to the disulfide bond increases the stability of the ADC linker. Structures such as (ID and (II) show increased in vivo stability when one or more R groups is selected from a lower alkyl such as methyl.

[0472] Another type of cleavable ADC linker that may be used is an ADC linker that is specifically cleaved by an enzyme. Such ADC linkers are typically peptide-based or include peptidic regions that act as substrates for enzymes. Peptide based ADC linkers tend to be more stable in plasma and extracellular milieu than chemically labile ADC linkers. Peptide bonds generally have good serum stability, as lysosomal proteolytic enzymes have very low activity in blood due to endogenous inhibitors and the unfavorably high pH value of blood compared to lysosomes. Release of a drug from a TBM occurs specifically due to the action of lysosomal proteases, e.g., cathepsin and plasmin. These proteases may be present at elevated levels in certain tumor cells.

[0473] In exemplary embodiments, the cleavable peptide is selected from tetrapeptides such as Gly-Phe-Leu-Gly (SEQ ID NO: 716), Ala-Leu-Ala-Leu (SEQ ID NO: 717) or dipeptides such as Val-Cit, Val-Ala, Met-(D)Lys, Asn-(D)Lys, Val-(D)Asp, Phe-Lys, Ile-Val, Asp-Val, His-Val, NorVal-(D)Asp, Ala-(D)Asp 5, Met-Lys, Asn-Lys, Ile-Pro, Me3Lys-Pro, PhenylGly-(D)Lys, Met-(D)Lys, Asn-(D)Lys, Pro-(D)Lys, Met-(D)Lys, Asn-(D)Lys, AM Met-(D)Lys, Asn-(D)Lys, AW Met-(D)Lys, and Asn-(D)Lys. In certain embodiments, dipeptides are preferred over longer polypeptides due to hydrophobicity of the longer peptides.

[0474] A variety of dipeptide-based cleavable ADC linkers useful for linking drugs such as doxorubicin, mitomycin, camptothecin, pyrrolobenzodiazepine, tallysomycin and auristatin/auristatin family members to TBMs have been described (see, Dubowchik et al., 1998, J. Org. Chem. 67:1866-1872; Dubowchik et al., 1998, Bioorg. Med. Chem. Lett. 8(21):3341-3346; Walker et al., 2002, Bioorg. Med. Chem. Lett. 12:217-219; Walker et al., 2004, Bioorg. Med. Chem. Lett. 14:4323-4327; Sutherland et al., 2013, Blood 122: 1455-1463; and Francisco et al., 2003, Blood 102:1458-1465, of each of which is incorporated herein by reference). All of these dipeptide ADC linkers, or modified versions of these dipeptide ADC linkers, may be used in the ADCs of the disclosure. Other dipeptide ADC linkers that may be used include those found in ADCs such as Seattle Genetics' Brentuximab Vendotin SGN-35 (Adcetris™), Seattle Genetics SGN-75 (anti-CD-70, Val-Cit-monomethyl auristatin F(MMAF), Seattle Genetics SGN-CD33A (anti-CD-33, Val-Ala-(SGD-1882)), Celldex Therapeutics glembatumumab (CDX-011) (anti-NMB, Val-Cit-monomethyl auristatin E (MMAE), and Cytogen PSMA-ADC (PSMA-ADC-1301) (anti-PSMA, Val-Cit-MMAE).

[0475] Enzymatically cleavable ADC linkers may include a self-immolative spacer to spatially separate the drug from the site of enzymatic cleavage. The direct attachment of a drug to a peptide ADC linker can result in proteolytic release of an amino acid adduct of the drug, thereby impairing its activity. The use of a self-immolative spacer allows for the elimination of the fully active, chemically unmodified drug upon amide bond hydrolysis.

[0476] One self-immolative spacer is the bifunctional para-aminobenzyl alcohol group, which is linked to the peptide through the amino group, forming an amide bond, while amine containing drugs may be attached through carbamate functionalities to the benzylic hydroxyl group of the ADC linker (PABC). The resulting prodrugs are activated upon protease-mediated cleavage, leading to a 1,6-elimination reaction releasing the unmodified drug, carbon dioxide, and remnants of the ADC linker group. The following scheme depicts the fragmentation of p-amidobenzyl ether and release of the drug:

[chemical structure]

wherein X-D represents the unmodified drug.

[0477] Heterocyclic variants of this self-immolative group have also been described. See for example, U.S. Pat. No. 7,989,434, incorporated herein by reference.

[0478] In some embodiments, the enzymatically cleavable ADC linker is a β-glucuronic acid-based ADC linker. Facile release of the drug may be realized through cleavage of the β-glucuronide glycosidic bond by the lysosomal enzyme β-glucuronidase. This enzyme is present abundantly within lysosomes and is overexpressed in some tumor types, while the enzyme activity outside cells is low. β-Glucuronic acid-based ADC linkers may be used to circumvent the tendency of an ADC to undergo aggregation due to the hydrophilic nature of β-glucuronides. In some embodiments, β-glucuronic acid-based ADC linkers are preferred as ADC linkers for ADCs linked to hydrophobic drugs. The following scheme depicts the release of the drug from and ADC containing a β-glucuronic acid-based ADC linker:

[chemical structure]

[0479] A variety of cleavable β-glucuronic acid-based ADC linkers useful for linking drugs such as auristatins, camptothecin and doxorubicin analogues, CBI minor-groove binders, and psymberin to TBMs have been described (see, see Nolting, Chapter 5 “Linker Technology in Antibody-Drug Conjugates,” In: Antibody-Drug Conjugates: Methods in Molecular Biology, vol. 1045, pp. 71-100, Laurent Ducry (Ed.), Springer Science & Business Medica, LLC, 2013; Jeffrey et al., 2006, Bioconjug. Chem. 17:831-840; Jeffrey et al., 2007, Bioorg. Med. Chem. Lett. 17:2278-2280; and Jiang et al., 2005, J. Am. Chem. Soc. 127:11254-11255, each of which is incorporated herein by reference). All of these β-glucuronic acid-based ADC linkers may be used in the ADCs of the disclosure.

[0480] Additionally, cytotoxic and/or cytostatic agents containing a phenol group can be covalently bonded to an ADC linker through the phenolic oxygen. One such ADC linker, described in WO 2007/089149, relies on a methodology in which a diamino-ethane “SpaceLink” is used in conjunction with traditional “PABO”-based self-immolative groups to deliver phenols. The cleavage of the ADC linker is depicted schematically below, where D represents a cytotoxic and/or cytostatic agent having a phenolic hydroxyl group.

[chemical structure]

[0481] Cleavable ADC linkers may include noncleavable portions or segments, and/or cleavable segments or portions may be included in an otherwise non-cleavable ADC linker to render it cleavable. By way of example only, polyethylene glycol (PEG) and related polymers may include cleavable groups in the polymer backbone. For example, a polyethylene glycol or polymer ADC linker may include one or more cleavable groups such as a disulfide, a hydrazone or a dipeptide.

[0482] Other degradable linkages that may be included in ADC linkers include ester linkages formed by the reaction of PEG carboxylic acids or activated PEG carboxylic acids with alcohol groups on a biologically active agent, wherein such ester groups generally hydrolyze under physiological conditions to release the biologically active agent. Hydrolytically degradable linkages include, but are not limited to, carbonate linkages; imine linkages resulting from reaction of an amine and an aldehyde; phosphate ester linkages formed by reacting an alcohol with a phosphate group; acetal linkages that are the reaction product of an aldehyde and an alcohol; orthoester linkages that are the reaction product of a formate and an alcohol; and oligonucleotide linkages formed by a phosphoramidite group, including but not limited to, at the end of a polymer, and a 5′ hydroxyl group of an oligonucleotide.

[0483] In certain embodiments, the ADC linker comprises an enzymatically cleavable peptide moiety, for example, an ADC linker comprising structural formula (IVa) or (IVb):

[chemical structure]

[0484] or a salt thereof, wherein: peptide represents a peptide (illustrated C→N and not showing the carboxy and amino “termini”) cleavable by a lysosomal enzyme; T represents a polymer comprising one or more ethylene glycol units or an alkylene chain, or combinations thereof; R^{a} is selected from hydrogen, alkyl, sulfonate and methyl sulfonate; p is an integer ranging from 0 to 5; q is 0 or 1; x is 0 or 1; y is 0 or 1; [symbol] represents the point of attachment of the ADC linker to a cytotoxic and/or cytostatic agent; and * represents the point of attachment to the remainder of the ADC linker.

[0485] In certain embodiments, the peptide is selected from a tripeptide or a dipeptide. In particular embodiments, the dipeptide is selected from: Val-Cit; Cit-Val; Ala-Ala; Ala-Cit; Cit-Ala; Asn-Cit; Cit-Asn; Cit-Cit; Val-Glu; Glu-Val; Ser-Cit; Cit-Ser; Lys-Cit; Cit-Lys; Asp-Cit; Cit-Asp; Ala-Val; Val-Ala; Phe-Lys; Val-Lys; Ala-Lys; Phe-Cit; Leu-Cit; Ile-Cit; Phe-Arg; and Trp-Cit. In certain embodiments, the dipeptide is selected from: Cit-Val; and Ala-Val.

[0486] Specific exemplary embodiments of ADC linkers according to structural formula (IVa) that may be included in the ADCs of the disclosure include the ADC linkers illustrated below (as illustrated, the ADC linkers include a group suitable for covalently linking the ADC linker to a TBM):

[chemical structure]

[chemical structure]

[0487] Specific exemplary embodiments of ADC linkers according to structural formula (IVb) that may be included in the ADCs of the disclosure include the ADC linkers illustrated below (as illustrated, the ADC linkers include a group suitable for covalently linking the ADC linker to a TBM):

[chemical structure]

[chemical structure]

[chemical structure]

[chemical structure]

[chemical structure]

[0488] In certain embodiments, the ADC linker comprises an enzymatically cleavable peptide moiety, for example, an ADC linker comprising structural formula (IVc) or (IVd):

[chemical structure]

[0489] or a salt thereof, wherein: peptide represents a peptide (illustrated C→N and not showing the carboxy and amino “termini”) cleavable by a lysosomal enzyme; T represents a polymer comprising one or more ethylene glycol units or an alkylene chain, or combinations thereof; Ra is selected from hydrogen, alkyl, sulfonate and methyl sulfonate; p is an integer ranging from 0 to 5; q is 0 or 1; x is 0 or 1; y is 0 or 1; [symbol] represents the point of attachment of the ADC linker to a cytotoxic and/or cytostatic agent; and * represents the point of attachment to the remainder of the ADC linker.

[0490] Specific exemplary embodiments of ADC linkers according to structural formula (IVc) that may be included in the ADCs of the disclosure include the ADC linkers illustrated below (as illustrated, the ADC linkers include a group suitable for covalently linking the ADC linker to a TBM):

[chemical structure]

[0491] Specific exemplary embodiments of ADC linkers according to structural formula (IVd) that may be included in the ADCs of the disclosure include the ADC linkers illustrated below (as illustrated, the ADC linkers include a group suitable for covalently linking the ADC linker to a TBM):

[chemical structure]

[chemical structure]

[chemical structure]

[chemical structure]

[0492] In certain embodiments, the ADC linker comprising structural formula (IVa), (IVb), (IVc), or (IVd) further comprises a carbonate moiety cleavable by exposure to an acidic medium. In particular embodiments, the ADC linker is attached through an oxygen to a cytotoxic and/or cytostatic agent.

[0493] 6.9.2.2. Non-Cleavable Linkers

[0494] Although cleavable ADC linkers may provide certain advantages, the ADC linkers comprising the ADCs of the disclosure need not be cleavable. For noncleavable ADC linkers, the release of drug does not depend on the differential properties between the plasma and some cytoplasmic compartments. The release of the drug is postulated to occur after internalization of the ADC via antigen-mediated endocytosis and delivery to lysosomal compartment, where the TBM is degraded to the level of amino acids through intracellular proteolytic degradation. This process releases a drug derivative, which is formed by the drug, the ADC linker, and the amino acid residue to which the ADC linker was covalently attached. The amino acid drug metabolites from conjugates with noncleavable ADC linkers are more hydrophilic and generally less membrane permeable, which leads to less bystander effects and less nonspecific toxicities compared to conjugates with a cleavable ADC linker. In general, ADCs with noncleavable ADC linkers have greater stability in circulation than ADCs with cleavable ADC linkers. Non-cleavable ADC linkers may be alkylene chains, or maybe polymeric in natures, such as, for example, based upon polyalkylene glycol polymers, amide polymers, or may include segments of alkylene chains, polyalkylene glocols and/or amide polymers.

[0495] A variety of non-cleavable ADC linkers used to link drugs to TBMs have been described. See, Jeffrey et al., 2006, Bioconjug. Chem. 17; 831-840; Jeffrey et al., 2007, Bioorg. Med. Chem. Lett. 17:2278-2280; and Jiang et al., 2005, J. Am. Chem. Soc. 127:11254-11255, each of which is incorporated herein by reference. All of these ADC linkers may be included in the ADCs of the disclosure.

[0496] In certain embodiments, the ADC linker is non-cleavable in vivo, for example an ADC linker according to structural formula (VIa), (VIb), (VIc) or (VId) (as illustrated, the ADC linkers include a group suitable for covalently linking the ADC linker to a TBM:

[chemical structure]

or salts thereof, wherein: R^{a} is selected from hydrogen, alkyl, sulfonate and methyl sulfonate; R^{x} is a moiety including a functional group capable of covalently linking the ADC linker to a TBM; and [symbol] represents the point of attachment of the ADC linker to a cytotoxic and/or cytostatic agent.

[0497] Specific exemplary embodiments of ADC linkers according to structural formula (VIa)-(VId) that may be included in the ADCs of the disclosure include the ADC linkers illustrated below (as illustrated, the ADC linkers include a group suitable for covalently linking the ADC linker to a TBM, and [symbol] represents the point of attachment to a cytotoxic and/or cytostatic agent):

[chemical structure]

[0498] 6.9.2.3. Groups Used to Attach Linkers to TBMs

[0499] A variety of groups may be used to attach ADC linker-drug synthons to TBMs to yield ADCs. Attachment groups can be electrophilic in nature and include: maleimide groups, activated disulfides, active esters such as NHS esters and HOBt esters, haloformates, acid halides, alkyl and benzyl halides such as haloacetamides. As discussed below, there are also emerging technologies related to “self-stabilizing” maleimides and “bridging disulfides” that can be used in accordance with the disclosure. The specific group used will depend, in part, on the site of attachment to the TBM.

[0500] One example of a “self-stabilizing” maleimide group that hydrolyzes spontaneously under TBM conjugation conditions to give an ADC species with improved stability is depicted in the schematic below. See US20130309256 A1; also Lyon et al., Nature Biotech published online, doi:10.1038/nbt.2968.

[0501] Normal System:

[chemical structure]

[0502] Leads to “DAR loss” over time

[0503] SGN MaIDPR (maleimido dipropylamino) system:

[chemical structure]

[0504] Polytherics has disclosed a method for bridging a pair of sulfhydryl groups derived from reduction of a native hinge disulfide bond. See, Badescu et al., 2014, Bioconjugate Chem. 25:1124-1136. The reaction is depicted in the schematic below. An advantage of this methodology is the ability to synthesize enriched DAR4 ADCs by full reduction of IgGs (to give 4 pairs of sulfhydryls) followed by reaction with 4 equivalents of the alkylating agent. ADCs containing “bridged disulfides” are also said to have increased stability.

[chemical structure]

[0505] Similarly, as depicted below, a maleimide derivative (1, below) that is capable of bridging a pair of sulfhydryl groups has been developed. See WO2013/085925.

[chemical structure]

[0506] 6.9.2.4. ADC Linker Selection Considerations

[0507] As is known by skilled artisans, the ADC linker selected for a particular ADC may be influenced by a variety of factors, including but not limited to, the site of attachment to the TBM (e.g., lys, cys or other amino acid residues), structural constraints of the drug pharmacophore and the lipophilicity of the drug. The specific ADC linker selected for an ADC should seek to balance these different factors for the specific TBM/drug combination. For a review of the factors that are influenced by choice of ADC linkers in ADCs, see Nolting, Chapter 5 “Linker Technology in Antibody-Drug Conjugates,” In: Antibody-Drug Conjugates: Methods in Molecular Biology, vol. 1045, pp. 71-100, Laurent Ducry (Ed.), Springer Science & Business Medica, LLC, 2013.

[0508] For example, ADCs have been observed to effect killing of bystander antigen-negative cells present in the vicinity of the antigen-positive tumor cells. The mechanism of bystander cell killing by ADCs has indicated that metabolic products formed during intracellular processing of the ADCs may play a role. Neutral cytotoxic metabolites generated by metabolism of the ADCs in antigen-positive cells appear to play a role in bystander cell killing while charged metabolites may be prevented from diffusing across the membrane into the medium and therefore cannot affect bystander killing. In certain embodiments, the ADC linker is selected to attenuate the bystander killing effect caused by cellular metabolites of the ADC. In certain embodiments, the ADC linker is selected to increase the bystander killing effect.

[0509] The properties of the ADC linker may also impact aggregation of the ADC under conditions of use and/or storage. Typically, ADCs reported in the literature contain no more than 3-4 drug molecules per antibody molecule (see, e.g., Chari, 2008, Acc Chem Res 41:98-107). Attempts to obtain higher drug-to-antibody ratios (“DAR”) often failed, particularly if both the drug and the ADC linker were hydrophobic, due to aggregation of the ADC (King et al., 2002, J Med Chem 45:4336-4343; Hollander et al., 2008, Bioconjugate Chem 19:358-361; Burke et al., 2009 Bioconjugate Chem 20:1242-1250). In many instances, DARs higher than 3-4 could be beneficial as a means of increasing potency. In instances where the cytotoxic and/or cytostatic agent is hydrophobic in nature, it may be desirable to select ADC linkers that are relatively hydrophilic as a means of reducing ADC aggregation, especially in instances where DARS greater than 3-4 are desired. Thus, in certain embodiments, the ADC linker incorporates chemical moieties that reduce aggregation of the ADCs during storage and/or use. An ADC linker may incorporate polar or hydrophilic groups such as charged groups or groups that become charged under physiological pH to reduce the aggregation of the ADCs. For example, an ADC linker may incorporate charged groups such as salts or groups that deprotonate, e.g., carboxylates, or protonate, e.g., amines, at physiological pH.

[0510] Exemplary polyvalent ADC linkers that have been reported to yield DARs as high as 20 that may be used to link numerous cytotoxic and/or cytostatic agents to a TBM are described in WO 2009/073445; WO 2010/068795; WO 2010/138719; WO 2011/120053; WO 2011/171020; WO 2013/096901; WO 2014/008375; WO 2014/093379; WO 2014/093394; WO 2014/093640, the content of which are incorporated herein by reference in their entireties.

[0511] In particular embodiments, the aggregation of the ADCs during storage or use is less than about 10% as determined by size-exclusion chromatography (SEC). In particular embodiments, the aggregation of the ADCs during storage or use is less than 10%, such as less than about 5%, less than about 4%, less than about 3%, less than about 2%, less than about 1%, less than about 0.5%, less than about 0.1%, or even lower, as determined by size-exclusion chromatography (SEC).

[0512] 6.9.3. Methods of Making ADCs

[0513] The ADCs of the disclosure may be synthesized using chemistries that are well-known. The chemistries selected will depend upon, among other things, the identity of the cytotoxic and/or cytostatic agent(s), the ADC linker and the groups used to attach ADC linker to the TBM. Generally, ADCs according to formula (I) may be prepared according to the following scheme:

D-L-R^{x}+Ab-R^{y}→[D-L-XY]ₙ-Ab (I)

[0514] where D, L, Ab, XY and n are as previously defined, and R^{x} and R^{y} represent complementary groups capable of forming a covalent linkages with one another, as discussed above.

[0515] The identities of groups R^{x} and R^{y} will depend upon the chemistry used to link synthon D-L-R^{x} to the TBM. Generally, the chemistry used should not alter the integrity of the TBM, for example its ability to bind its target. Preferably, the binding properties of the conjugated antibody will closely resemble those of the unconjugated TBM. A variety of chemistries and techniques for conjugating molecules to biological molecules and in particular to immunoglobulins, whose components are typically building blocks of the TBMs of the disclosure, are well-known. See, e.g., Amon et al., “Monoclonal Antibodies For Immunotargeting Of Drugs In Cancer Therapy,” in: Monoclonal Antibodies And Cancer Therapy, Reisfeld et al. Eds., Alan R. Liss, Inc., 1985; Hellstrom et al., “Antibodies For Drug Delivery,” in: Controlled Drug Delivery, Robinson et al. Eds., Marcel Dekker, Inc., 2nd Ed. 1987; Thorpe, “Antibody Carriers Of Cytotoxic Agents In Cancer Therapy: A Review,” in: Monoclonal Antibodies '84: Biological And Clinical Applications, Pinchera et al., Eds., 1985; “Analysis, Results, and Future Prospective of the Therapeutic Use of Radiolabeled Antibody In Cancer Therapy,” in: Monoclonal Antibodies For Cancer Detection And Therapy, Baldwin et al., Eds., Academic Press, 1985; Thorpe et al., 1982, Immunol. Rev. 62:119-58; PCT publication WO 89/12624. Any of these chemistries may be used to link the synthons to a TBM.

[0516] A number of functional groups R^{x} and chemistries useful for linking synthons to accessible lysine residues are known, and include by way of example and not limitation NHS-esters and isothiocyanates.

[0517] A number of functional groups R^{x} and chemistries useful for linking synthons to accessible free sulfhydryl groups of cysteine residues are known, and include by way of example and not limitation haloacetyls and maleimides.

[0518] However, conjugation chemistries are not limited to available side chain groups. Side chains such as amines may be converted to other useful groups, such as hydroxyls, by linking an appropriate small molecule to the amine. This strategy can be used to increase the number of available linking sites on the antibody by conjugating multifunctional small molecules to side chains of accessible amino acid residues of the TBM. Functional groups R^{x} suitable for covalently linking the synthons to these “converted” functional groups are then included in the synthons.

[0519] The TBM may also be engineered to include amino acid residues for conjugation. An approach for engineering TBMs to include non-genetically encoded amino acid residues useful for conjugating drugs in the context of ADCs is described by Axup et al., 2012, Proc Natl Acad Sci USA. 109(40):16101-16106, as are chemistries and functional group useful for linking synthons to the non-encoded amino acids.

[0520] Typically, the synthons are linked to the side chains of amino acid residues of the TBM, including, for example, the primary amino group of accessible lysine residues or the sulfhydryl group of accessible cysteine residues. Free sulfhydryl groups may be obtained by reducing interchain disulfide bonds.

[0521] For linkages where R^{y} is a sulfhydryl group (for example, when R^{x} is a maleimide), the TBM is generally first fully or partially reduced to disrupt interchain disulfide bridges between cysteine residues.

[0522] Cysteine residues that do not participate in disulfide bridges may engineered into a TBM by modification of one or more codons. Reducing these unpaired cysteines yields a sulfhydryl group suitable for conjugation. Preferred positions for incorporating engineered cysteines include, by way of example and not limitation, positions S112C, S113C, A114C, S115C, A176C, 5180C, S252C, V286C, V292C, S357C, A359C, S398C, S428C (Kabat numbering) on the human IgG₁ heavy chain and positions V110C, S114C, S121C, S127C, S168C, V205C (Kabat numbering) on the human Ig kappa light chain (see, e.g., U.S. Pat. Nos. 7,521,541, 7,855,275 and 8,455,622).

[0523] As will appreciated by skilled artisans, the number of cytotoxic and/or cytostatic agents linked to a TBM molecule may vary, such that a collection of ADCs may be heterogeneous in nature, where some TBMs contain one linked agent, some two, some three, etc. (and some none). The degree of heterogeneity will depend upon, among other things, the chemistries used for linking the cytotoxic and/or cytostatic agents. For example, where the TBMs are reduced to yield sulfhydryl groups for attachment, heterogeneous mixtures of TBMs having zero, 2, 4, 6 or 8 linked agents per molecule are often produced. Furthermore, by limiting the molar ratio of attachment compound, TBMs having zero, 1, 2, 3, 4, 5, 6, 7 or 8 linked agents per molecule are often produced. Thus, it will be understood that depending upon context, stated drug TBM ratios (DTRs) may be averages for a collection of TBMs. For example, “DTR4” can refer to an ADC preparation that has not been subjected to purification to isolate specific DTR peaks and can comprise a heterogeneous mixture of ADC molecules having different numbers of cytostatic and/or cytotoxic agents attached per TBM (e.g., 0, 2, 4, 6, 8 agents per TBM), but has an average drug-to-TBM ratio of 4. Similarly, in some embodiments, “DTR2” refers to a heterogeneous ADC preparation in which the average drug-to-TBM ratio is 2.

[0524] When enriched preparations are desired, TBMs having defined numbers of linked cytotoxic and/or cytostatic agents may be obtained via purification of heterogeneous mixtures, for example, via column chromatography, e.g., hydrophobic interaction chromatography.

[0525] Purity may be assessed by a variety of methods, as is known in the art. As a specific example, an ADC preparation may be analyzed via HPLC or other chromatography and the purity assessed by analyzing areas under the curves of the resultant peaks.

### 6.10. Preparations

[0526] The disclosure provides preparations comprising a plurality of TBMs and/or a plurality of TBM conjugates, e.g., at least 100, at least 1,000, at least 10,000, or at least 100,000 TBMs and/or TBM conjugates. Preparations include, for example, cell culture supernatants comprising TBM molecules and compositions of enriched or purified TBM molecules (e.g., TBMs fractionated or purified from a cell culture supernatant).

[0527] Preparations can comprise, for example, a plurality of TBMs or conjugates wherein at least 50% (e.g., at least 50%, at least 60%, at least 70%, at least 80%, at least 90%, at least 95%, at least 97%, at least 98%, at least 99%) of the trispecific molecules in the preparation have the same primary amino acid sequence. In various embodiments, 50% to 99% of the trispecific molecules in a preparation have the same primary amino acid sequence (e.g., 50% to 95%, 50% to 80%, 50% to 70%, 60% to 95%, 60% to 80%, 60% to 70%, 70% to 95%, 70% to 80%, 80% to 95% 95% to 99%, or any range bounded by any two of the foregoing values).

[0528] In some embodiments, a majority of the the trispecific molecules in a preparation have the same interchain crosslinks (e.g., at least 50%, at least 60%, at least 70%, at least 80%, at least 90%, at least 95%, at least 97%, at least 98%, or at least 99%). As used herein, an “interchain crosslink” refers to a crosslink between two linear polypeptide chains, e.g., crosslinks created by disulfide bridges. In various embodiments, 50% to 99% of the trispecific molecules in a preparation have the same interchain crosslinks (e.g., 50% to 95%, 50% to 80%, 50% to 70%, 60% to 95%, 60% to 80%, 60% to 70%, 70% to 95%, 70% to 80%, 80% to 95% 95% to 99%, or any range bounded by any two of the foregoing values).

[0529] In some embodiments, a majority of the the trispecific molecules in a preparation have the same ABM1:ABM2:ABM3 ratio (e.g., at least 50%, at least 60%, at least 70%, at least 80%, at least 90%, at least 95%, at least 97%, at least 98%, or at least 99%). In various embodiments, 50% to 99% of the trispecific molecules in a preparation have the same ABM1:ABM2:ABM3 ratio (e.g., 50% to 95%, 50% to 80%, 50% to 70%, 60% to 95%, 60% to 80%, 60% to 70%, 70% to 95%, 70% to 80%, 80% to 95% 95% to 99%, or any range bounded by any two of the foregoing values).

### 6.11. Pharmaceutical Compositions

[0530] The TBMs of the disclosure (as well as their conjugates; references to TBMs in this disclosure also refers to conjugates comprising the TBMs, such as ADCs, unless the context dictates otherwise) can be formulated as pharmaceutical compositions comprising the TBMs, for example containing one or more pharmaceutically acceptable excipients or carriers. To prepare pharmaceutical or sterile compositions comprising the TBMs of the present disclosure a TBM preparation can be combined with one or more pharmaceutically acceptable excipient or carrier.

[0531] For example, formulations of TBMs can be prepared by mixing TBMs with physiologically acceptable carriers, excipients, or stabilizers in the form of, e.g., lyophilized powders, slurries, aqueous solutions, lotions, or suspensions (see, e.g., Hardman et al., 2001, Goodman and Gilman's The Pharmacological Basis of Therapeutics, McGraw-Hill, New York, N.Y.; Gennaro, 2000, Remington: The Science and Practice of Pharmacy, Lippincott, Williams, and Wilkins, New York, N.Y.; Avis, et al. (eds.), 1993, Pharmaceutical Dosage Forms: General Medications, Marcel Dekker, NY; Lieberman, et al. (eds.), 1990, Pharmaceutical Dosage Forms: Tablets, Marcel Dekker, NY; Lieberman, et al. (eds.), 1990, Pharmaceutical Dosage Forms: Disperse Systems, Marcel Dekker, NY; Weiner and Kotkoskie, 2000, Excipient Toxicity and Safety, Marcel Dekker, Inc., New York, N.Y.).

[0532] Selecting an administration regimen for a TBM depends on several factors, including the serum or tissue turnover rate of the TBM, the level of symptoms, the immunogenicity of the TBM, and the accessibility of the target cells. In certain embodiments, an administration regimen maximizes the amount of TBM delivered to the subject consistent with an acceptable level of side effects. Accordingly, the amount of TBM delivered depends in part on the particular TBM and the severity of the condition being treated. Guidance in selecting appropriate doses of antibodies and small molecules are available (see, e.g., Wawrzynczak, 1996, Antibody Therapy, Bios Scientific Pub. Ltd, Oxfordshire, UK; Kresina (ed.), 1991, Monoclonal Antibodies, Cytokines and Arthritis, Marcel Dekker, New York, N.Y.; Bach (ed.), 1993, Monoclonal Antibodies and Peptide Therapy in Autoimmune Diseases, Marcel Dekker, New York, N.Y.; Baert et al., 2003, New Engl. J. Med. 348:601-608; Milgrom et al., 1999, New Engl. J. Med. 341:1966-1973; Slamon et al., 2001, New Engl. J. Med. 344:783-792; Beniaminovitz et al., 2000, New Engl. J. Med. 342:613-619; Ghosh et al., 2003, New Engl. J. Med. 348:24-32; Lipsky et al., 2000, New Engl. J. Med. 343:1594-1602).

[0533] Determination of the appropriate dose is made by the clinician, e.g., using parameters or factors known or suspected in the art to affect treatment or predicted to affect treatment. Generally, the dose begins with an amount somewhat less than the optimum dose and it is increased by small increments thereafter until the desired or optimum effect is achieved relative to any negative side effects. Important diagnostic measures include those of symptoms of, e.g., the inflammation or level of inflammatory cytokines produced.

[0534] Actual dosage levels of the TBMs in the pharmaceutical compositions of the present disclosure may be varied so as to obtain an amount of the TBM which is effective to achieve the desired therapeutic response for a particular subject, composition, and mode of administration, without being toxic to the subject. The selected dosage level will depend upon a variety of pharmacokinetic factors including the activity of the particular TBM, the route of administration, the time of administration, the rate of excretion of the particular TBM being employed, the duration of the treatment, other agents (e.g., active agents such as therapeutic drugs or compounds and/or inert materials used as carriers) in combination with the particular TBM employed, the age, sex, weight, condition, general health and prior medical history of the subject being treated, and like factors known in the medical arts.

[0535] Compositions comprising the TBMs of the disclosure can be provided by continuous infusion, or by doses at intervals of, e.g., one day, one week, or 1-7 times per week. Doses can be provided intravenously, subcutaneously, topically, orally, nasally, rectally, intramuscular, intracerebrally, or by inhalation. A specific dose protocol is one involving the maximal dose or dose frequency that avoids significant undesirable side effects.

[0536] An effective amount for a particular subject may vary depending on factors such as the condition being treated, the overall health of the subject, the method route and dose of administration and the severity of side effects (see, e.g., Maynard, et al. (1996) A Handbook of SOPs for Good Clinical Practice, Interpharm Press, Boca Raton, Fla.; Dent (2001) Good Laboratory and Good Clinical Practice, Urch Publ., London, UK).

[0537] The route of administration may be by, e.g., topical or cutaneous application, injection or infusion by intravenous, intraperitoneal, intracerebral, intramuscular, intraocular, intraarterial, intracerebrospinal, intralesional, or by sustained release systems or an implant (see, e.g., Sidman et al., 1983, Biopolymers 22:547-556; Langer et al., 1981, J. Biomed. Mater. Res. 15:167-277; Langer, 1982, Chem. Tech. 12:98-105; Epstein et al., 1985, Proc. Natl. Acad. Sci. USA 82:3688-3692; Hwang et al., 1980, Proc. Natl. Acad. Sci. USA 77:4030-4034; U.S. Pat. Nos. 6,350,466 and 6,316,024). Where necessary, the composition may also include a solubilizing agent and a local anesthetic such as lidocaine to ease pain at the site of the injection. In addition, pulmonary administration can also be employed, e.g., by use of an inhaler or nebulizer, and formulation with an aerosolizing agent. See, e.g., U.S. Pat. Nos. 6,019,968, 5,985,320, 5,985,309, 5,934,272, 5,874,064, 5,855,913, 5,290,540, and 4,880,078; and PCT Publication Nos. WO 92/19244, WO 97/32572, WO 97/44013, WO 98/31346, and WO 99/66903, each of which is incorporated herein by reference their entirety.

[0538] A composition of the present disclosure may also be administered via one or more routes of administration using one or more of a variety of methods known in the art. As will be appreciated by the skilled artisan, the route and/or mode of administration will vary depending upon the desired results. Selected routes of administration for TBMs include intravenous, intramuscular, intradermal, intraperitoneal, subcutaneous, spinal or other general routes of administration, for example by injection or infusion. General administration may represent modes of administration other than enteral and topical administration, usually by injection, and includes, without limitation, intravenous, intramuscular, intraarterial, intrathecal, intracapsular, intraorbital, intracardiac, intradermal, intraperitoneal, transtracheal, subcutaneous, subcuticular, intraarticular, subcapsular, subarachnoid, intraspinal, epidural and intrasternal injection and infusion. Alternatively, a composition of the disclosure can be administered via a non-general route, such as a topical, epidermal or mucosal route of administration, for example, intranasally, orally, vaginally, rectally, sublingually or topically. In one embodiment, the TBMs is administered by infusion. In another embodiment, the multispecific epitope binding protein of the disclosure is administered subcutaneously.

[0539] If the TBMs are administered in a controlled release or sustained release system, a pump may be used to achieve controlled or sustained release (see Langer, supra; Sefton, 1987, CRC Crit. Ref Biomed. Eng. 14:20; Buchwald et al., 1980, Surgery 88:507; Saudek et al., 1989, N. Engl. J. Med. 321:574). Polymeric materials can be used to achieve controlled or sustained release of the therapies of the disclosure (see, e.g., Medical Applications of Controlled Release, Langer and Wise (eds.), CRC Pres., Boca Raton, Fla. (1974); Controlled Drug Bioavailability, Drug Product Design and Performance, Smolen and Ball (eds.), Wiley, New York (1984); Ranger and Peppas, 1983, J., Macromol. Sci. Rev. Macromol. Chem. 23:61; see also Levy et al., 1985, Science 228:190; During et al., 1989, Ann. Neurol. 25:351; Howard et al., 1989, J. Neurosurg. 71:105); U.S. Pat. Nos. 5,679,377; 5,916,597; 5,912,015; 5,989,463; 5,128,326; PCT Publication No. WO 99/15154; and PCT Publication No. WO 99/20253. Examples of polymers used in sustained release formulations include, but are not limited to, poly(2-hydroxy ethyl methacrylate), poly(methyl methacrylate), poly(acrylic acid), poly(ethylene-co-vinyl acetate), poly(methacrylic acid), polyglycolides (PLG), polyanhydrides, poly(N-vinyl pyrrolidone), poly(vinyl alcohol), polyacrylamide, poly(ethylene glycol), polylactides (PLA), poly(lactide-co-glycolides) (PLGA), and polyorthoesters. In one embodiment, the polymer used in a sustained release formulation is inert, free of leachable impurities, stable on storage, sterile, and biodegradable. A controlled or sustained release system can be placed in proximity of the prophylactic or therapeutic target, thus requiring only a fraction of the systemic dose (see, e.g., Goodson, in Medical Applications of Controlled Release, supra, vol. 2, pp. 115-138 (1984)).

[0540] Controlled release systems are discussed in the review by Langer (1990, Science 249:1527-1533). Any technique known to one of skill in the art can be used to produce sustained release formulations comprising one or more TBMs of the disclosure. See, e.g., U.S. Pat. No. 4,526,938, PCT publication WO 91/05548, PCT publication WO 96/20698, Ning et al., 1996, Radiotherapy & Oncology 39:179-189, Song et al., 1995, PDA Journal of Pharmaceutical Science & Technology 50:372-397, Cleek et al., 1997, Pro. Intl Symp. Control. Rel. Bioact. Mater. 24:853-854, and Lam et al., 1997, Proc. Intl Symp. Control Rel. Bioact. Mater. 24:759-760, each of which is incorporated herein by reference in their entirety.

[0541] If the TBMs are administered topically, they can be formulated in the form of an ointment, cream, transdermal patch, lotion, gel, shampoo, spray, aerosol, solution, emulsion, or other form well-known to one of skill in the art. See, e.g., Remington's Pharmaceutical Sciences and Introduction to Pharmaceutical Dosage Forms, 19th ed., Mack Pub. Co., Easton, Pa. (1995). For non-sprayable topical dosage forms, viscous to semi-solid or solid forms comprising a carrier or one or more excipients compatible with topical application and having a dynamic viscosity, in some instances, greater than water are typically employed. Suitable formulations include, without limitation, solutions, suspensions, emulsions, creams, ointments, powders, liniments, salves, and the like, which are, if desired, sterilized or mixed with auxiliary agents (e.g., preservatives, stabilizers, wetting agents, buffers, or salts) for influencing various properties, such as, for example, osmotic pressure. Other suitable topical dosage forms include sprayable aerosol preparations wherein the active ingredient, in some instances, in combination with a solid or liquid inert carrier, is packaged in a mixture with a pressurized volatile (e.g., a gaseous propellant, such as freon) or in a squeeze bottle. Moisturizers or humectants can also be added to pharmaceutical compositions and dosage forms if desired. Examples of such additional ingredients are well-known in the art.

[0542] If the compositions comprising the TBMs are administered intranasally, the TBMs can be formulated in an aerosol form, spray, mist or in the form of drops. In particular, prophylactic or therapeutic agents for use according to the present disclosure can be conveniently delivered in the form of an aerosol spray presentation from pressurized packs or a nebulizer, with the use of a suitable propellant (e.g., dichlorodifluoromethane, trichlorofluoromethane, dichlorotetrafluoroethane, carbon dioxide or other suitable gas). In the case of a pressurized aerosol the dosage unit may be determined by providing a valve to deliver a metered amount. Capsules and cartridges (composed of, e.g., gelatin) for use in an inhaler or insufflator may be formulated containing a powder mix of the compound and a suitable powder base such as lactose or starch.

[0543] The TBMs of the disclosure can be administered in combination therapy regimens, as described in Section 6.13, infra.

[0544] In certain embodiments, the TBMs can be formulated to ensure proper distribution in vivo. For example, the blood-brain barrier (BBB) excludes many highly hydrophilic compounds. To ensure that the therapeutic compounds of the disclosure cross the BBB (if desired), they can be formulated, for example, in liposomes. For methods of manufacturing liposomes, see, e.g., U.S. Pat. Nos. 4,522,811; 5,374,548; and 5,399,331. The liposomes may comprise one or more moieties which are selectively transported into specific cells or organs, thus enhance targeted drug delivery (see, e.g., Ranade, 1989, J. Clin. Pharmacol. 29:685). Exemplary targeting moieties include folate or biotin (see, e.g., U.S. Pat. No. 5,416,016 to Low et al.); mannosides (Umezawa et al., 1988, Biochem. Biophys. Res. Commun. 153:1038); antibodies (Bloeman et al., 1995, FEBS Lett. 357:140; Owais et al., 1995, Antimicrob. Agents Chemother. 39:180); surfactant protein A receptor (Briscoe et al., 1995, Am. J. Physiol. 1233:134); p 120 (Schreier et al., 1994, J. Biol. Chem. 269:9090); see also Keinanen and Laukkanen, 1994, FEBS Lett. 346:123; Killion and Fidler, 1994, Immunomethods 4:273.

[0545] When used in combination therapy, e.g., as described in Section 6.13, infra, a TBM of the disclosure and one or more additional agents can be administered to a subject in the same pharmaceutical composition. Alternatively, the TBM and the additional agent(s) of the combination therapies can be administered concurrently to a subject in separate pharmaceutical compositions.

[0546] The therapeutic methods described herein may further comprise carrying a “companion diagnostic” test whereby a sample from a subject who is a candidate for therapy with a TBM of the disclosure is tested for the expression of the TAA targeted by ABM3. The companion diagnostic test can be performed prior to initiating therapy with a TBM of the disclosure and/or during a therapeutic regimen with a TBM of the disclosure to monitor the subject's continued suitability for TBM therapy. The agent used in the companion diagnostic can be the TBM itself or another diagnostic agent, for example a labeled monospecific antibody against the TAA recognized by ABM3 or a nucleic acid probe to detect TAA RNA. The sample that can be tested in a companion diagnostic assay can be any sample in which the cells targeted by the TBM may be present, from example a tumor (e.g., a solid tumor) biopsy, lymph, stool, urine, blood or any other bodily fluid that might contain circulating tumor cells.

### 6.12. Therapeutic Indications

[0547] The TBMs of the disclosure can be used in the treatment of any proliferative disorder (e.g., cancer) that expresses a TAA. In particular embodiments, the cancer is HER2+ cancer, acute lymphoblastic leukemia (ALL), acute myeloid leukemia (AML), adrenocortical carcinoma, anal cancer, appendix cancer, astrocytoma, basal cell carcinoma, brain tumor, bile duct cancer, bladder cancer, bone cancer, breast cancer, bronchial tumor, Burkitt Lymphoma, carcinoma of unknown primary origin, cardiac tumor, cervical cancer, chordoma, chronic lymphocytic leukemia (CLL), chronic myelogenous leukemia (CML), chronic myeloproliferative neoplasm, colon cancer, colorectal cancer, craniopharyngioma, cutaneous T-cell lymphoma, ductal carcinoma, embryonal tumor, endometrial cancer, ependymoma, esophageal cancer, esthesioneuroblastoma, fibrous histiocytoma, Ewing sarcoma, eye cancer, germ cell tumor, gallbladder cancer, gastric cancer, gastrointestinal carcinoid tumor, gastrointestinal stromal tumor, gestational trophoblastic disease, glioma, head and neck cancer, hairy cell leukemia, hepatocellular cancer, histiocytosis, Hodgkin lymphoma, hypopharyngeal cancer, intraocular melanoma, islet cell tumor, Kaposi sarcoma, kidney cancer, Langerhans cell histiocytosis, laryngeal cancer, leukemia, lip and oral cavity cancer, liver cancer, lobular carcinoma in situ, lung cancer, lymphoma, macroglobulinemia, malignant fibrous histiocytoma, melanoma, Merkel cell carcinoma, mesothelioma, metastatic squamous neck cancer with occult primary, midline tract carcinoma involving NUT gene, mouth cancer, multiple endocrine neoplasia syndrome, multiple myeloma, mycosis fungoides, myelodysplastic syndrome, myelodysplastic/myeloproliferative neoplasm, nasal cavity and para-nasal sinus cancer, nasopharyngeal cancer, neuroblastoma, non-Hodgkin lymphoma, non-small cell lung cancer, oropharyngeal cancer, osteosarcoma, ovarian cancer, pancreatic cancer, papillomatosis, paraganglioma, parathyroid cancer, penile cancer, pharyngeal cancer, pheochromocytomas, pituitary tumor, pleuropulmonary blastoma, primary central nervous system lymphoma, prostate cancer, rectal cancer, renal cell cancer, renal pelvis and ureter cancer, retinoblastoma, rhabdoid tumor, salivary gland cancer, Sezary syndrome, skin cancer, small cell lung cancer, small intestine cancer, soft tissue sarcoma, spinal cord tumor, stomach cancer, T-cell lymphoma, teratoid tumor, testicular cancer, throat cancer, thymoma and thymic carcinoma, thyroid cancer, urethral cancer, uterine cancer, vaginal cancer, vulvar cancer, or Wilms tumor.

[0548] Table 14 below shows exemplary indications that TBMs targeting particular TAAs can be used against.

TABLE 14
Examples of Tumor-Associated Antigen Indications

| Target | Exemplary Indication(s) |
|---|---|
| ADRB3 | Ewing sarcoma |
| ALK | NSCLC, ALCL, IMT, neuroblastoma |
| B7H3 | melanoma, osteosarcoma, leukemia, breast, prostate, ovarian, pancreatic, |
| | colorectal cancers |
| BCMA | multiple myeloma, leukemia (e.g., acute lymphoblastic leukemia (“ALL”), |
| | acute myeloid leukemia (“AML”), chronic lymphocytic leukemia (“CLL”), |
| | chronic myeloid leukemia (“CML”) and hairy cell leukemia (“HCL”)); |
| | lymphoma (e.g., Hodgkin’s lymphoma, non-Hodgkin’s lymphoma, |
| | including diffuse large B-cell lymphoma (“DLBCL”)) |
| Cadherin 17 | gastric, pancreatic, and colorectal adenocarcinomas |
| CAIX | clear-cell renal cell carcinoma, hypoxic solid tumors, head and neck |
| | squamous carcinoma |
| CD123 | leukemia (e.g., ALL, CLL, AML, CML, HCL); lymphoma (e.g., Hodgkin’s |
| | lymphoma, non-Hodgkin’s lymphoma, e.g., DLBCL); multiple myeloma. |
| | In a preferred embodiment, the indication is AML. |
| CD171 | neuroblastoma, paraganglioma |
| CD179a | B cell malignancies |
| CD19 | leukemia (e.g., ALL, CLL, AML, CML, HCL); lymphoma (e.g., Hodgkin’s |
| | lymphoma, non-Hodgkin's lymphoma, e.g., DLBCL); multiple myeloma. |
| CD20 | leukemia (e.g., ALL, CLL, AML, CML, HCL); lymphoma (e.g., Hodgkin’s |
| | lymphoma, non-Hodgkin's lymphoma, e.g., DLBCL); multiple myeloma. |
| CD22 | leukemia (e.g., ALL, CLL, AML, CML, HCL); lymphoma (e.g., Hodgkin’s |
| | lymphoma, non-Hodgkin’s lymphoma, e.g., DLBCL); multiple myeloma; |
| | lung cancer |
| CD24 | ovarian, breast, prostate, bladder, renal, non-small cell carcinomas |
| CD30 | anaplastic large cell lymphoma, embryonal carcinoma, Hodgkin Lymphoma |
| CD32b | B cell malignancies, gastric, pancreatic, esophageal, glioblastoma, breast, |
| | colorectal |
| CD33 | leukemia (e.g., ALL, CLL, AML, CML, HCL); lymphoma (e.g., Hodgkin’s |
| | lymphoma, non-Hodgkin’s lymphoma, e.g., DLBCL); multiple myeloma. In |
| | a preferred embodiment, the indication is AML. |
| CD38 | leukemia (e.g., ALL, CLL, AML, CML, HCL); lymphoma (e.g., Hodgkin’s |
| | lymphoma, non-Hodgkin’s lymphoma, e.g., DLBCL); multiple myeloma |
| CD44v6 | colon cancer, head and neck small cell carcinoma |
| CD97 | B cell malignancies, gastric, pancreatic, esophageal, glioblastoma, breast, |
| | colorectal |
| CEA | colorectal carcinoma, gastric carcinoma, pancreatic carcinoma, lung |
| | cancer, breast cancer, medullary thyroid carcinoma |
| CLDN6 | ovarian, breast, lung cancer |
| CLL-1 | leukemia (e.g., ALL, CLL, AML, CML, HCL); lymphoma (e.g., Hodgkin’s |
| | lymphoma, non-Hodgkin’s lymphoma, e.g., DLBCL); multiple myeloma. In |
| | a preferred embodiment, the indication is AML. |
| CS1 | multiple myeloma |
| EGFR | squamous cell carcinoma of lung, anal cancer, glioblastoma, epithelian |
| | tumors of head and neck, colon cancer |
| EGFRvIII | Glioblastoma |
| EPCAM | gastrointestestinal carcinoma, colorectal cancer |
| EphA2 | kaposi's sarcoma, glioblastoma, solid tumors, glioma |
| Ephrin B2 | thyroid cancer, breast cancer, malignant melanoma |
| ERBB2 | breast, ovarian, gastric cancers, lung adenocarcinoma, non-small cell lung |
| (Her2/neu) | cancer, uterine cancer, uterine serous endometrial carcinoma, salivary duct |
| | carcinoma, |
| FAP | pancreatic cancer, colorectal cancer, metastasis, epithelial cancers, soft |
| | tissue sarcomas |
| FCRL5 | multiple myeloma |
| FLT3 | leukemia (e.g., ALL, CLL, AML, CML, HCL); lymphoma (e.g., Hodgkin’s |
| | lymphoma, non-Hodgkin’s lymphoma, e.g., DLBCL); multiple myeloma. In |
| | a preferred embodiment, the indication is AML. |
| Folate receptor | ovarian, breast, renal, lung, colorectal, brain cancers |
| alpha | |
| Folate receptor | ovarian cancer |
| beta | |
| Fucosyl GM1 | AML, myeloma |
| GD2 | malignant melanoma, neuroblastoma |
| GD3 | Melanoma |
| GloboH | ovarian, gastric, prostate, lung, breast, and pancreatic cancers |
| gp100 | Melanoma |
| GPNMB | breast cancer, head and neck cancers |
| GPR20 | GIST |
| GPR64 | Ewing sarcoma, prostate, kidney and lung sarcomas |
| GPRC5D | multiple myeloma |
| HAVCR1 | renal cancer |
| HER3 | colon and gastric cancers |
| HMWMAA | melanoma, glioblastoma, breast cancer |
| IGF-I receptor | breast, prostate, lung cancers |
| IL-11Ra | papillary thyroid cancer, osteosarcoma, colorectal adenocarcinoma, |
| | lymphocytic leukemia |
| IL-13Ra2 | renal cell carcinoma, prostate cancer, gliomas, head and neck cancer, |
| | astrocytoma |
| KIT | myeloid leukemia, kaposi’s sarcoma, erythroleukemia, gastrointestinal |
| | stromal tumors |
| KLRG2 | breast cancers, lung cancers and ovarian cancers. |
| LewisY | squamous cell lung carcinoma, lung adenocarcinoma, ovarian carcinoma, |
| | and colorectal adenocarcinoma |
| LMP2 | prostate cancer, Hodgkin’s lymphoma, nasopharyngeal carcinoma |
| LRP6 | breast cancer |
| LY6K | breast, lung, ovarian, and cervical cancer |
| LYPD8 | colorectal and gastric cancers |
| Mesothelin | mesothelioma, pancreatic cancer, ovarian cancer, stomach cancer, lung |
| | cancer, endometrial cancer. |
| MUC1 | breast and ovarian cancers, lung, stomach, pancreatic, prostate cancers |
| NCAM | melanoma, Wilms’ tumor, small cell lung cancer, neuroblastoma, myeloma, |
| | paraganglioma, pancreatic acinar cell carcinoma, myeloid leukemia |
| NY-BR-1 | breast cancer |
| o-acetyl GD2 | neuroblastoma, melanoma |
| OR51E2 | prostate cancer |
| PANX3 | osteosarcoma |
| PLAC1 | hepatocellular carcinoma |
| Polysialic acid | small cell lung cancer |
| PDGFR-beta | myelomonocytic leukemia, chronic myeloid leukemia, acute myelogenous |
| | leukemia, acute lymphoblastic leukemia |
| PRSS21 | colon cancer, testicular cancer, ovarian cancer |
| PSCA | prostate cancer, gastric and bladder cancers |
| PSMA | prostate cancer, |
| ROR1 | metastatic cancers, chronic lymphocytic leukemia, solid tumors in lung, |
| | breast, ovarian, colon, pancreatic, sarcoma |
| SLC34A2 | bladder cancer |
| SLC39A6 | breast cancer, esophageal cancer |
| SLITRK6 | breast cancer, urothelial cancer, lung cancer |
| SSEA-4 | breast cancer, cancer stem cells, epithelial ovarian carcinoma |
| TACSTD2 | carcinomas, e.g., non-small-cell lung cancer |
| TAG72 | ovarian, breast, colon, lung, pancreatic cancers, gastric cancer |
| TEM1/CD248 | colorectal cancer |
| TEM7R | colorectal cancer |
| Tn | colorectal, breast cancers, cervical, lung, stomach cancers |
| TSHR | thyroid cancer, multiple myeloma |
| Tyrosinase | prostate cancer, melanoma |
| UPK2 | bladder cancer |
| VEGFR2 | ovarian and pancreatic cancers, renal cell carcinoma, colorectal cancer, |
| | medullary thyroid carcinoma |

[0549] Accordingly, the present disclosure provides methods of treating cancer comprising administering to a subject suffering from cancer a TBM in which ABM3 (i.e., the TAA ABM) binds to a TAA expressed on that type of cancer. In some embodiments, a TBM that targets a TAA identified in Table 14 is can be administered to a subject afflicted with a cancer that Table 14 indicates expressed the TAA. By way of example and not limitation, a TBM that targets EPCAM or folate receptor alpha can be administered to a subject afflicted with colorectal cancer, a TBM that targets BCMA or CD19 can be administered to a subject afflicted with a blood cancer such as multiple myeloma, a TBM that targets PSCA or PCMA can be administered a subject afflicted with prostate cancer, a TBM that targets tyrosinase or GP3 can be administered to a subject afflicted with melanoma, a TBM that targets CD33, CLL-1 or FLT3 can be administered to a subject afflicted with a blood cancer such as acute myeloid leukemia.

### 6.13. Combination Therapy

[0550] A TBM of the disclosure may be used in combination other known agents and therapies. For example, the TBMs of the disclosure can be used in treatment regimens in combination with surgery, chemotherapy, antibodies, radiation, peptide vaccines, steroids, cytoxins, or a combination thereof.

[0551] For convenience, an agent that is used in combination with a TBM of the disclosure is referred to herein as an “additional” agent.

[0552] Administered “in combination,” as used herein, means that two (or more) different treatments are delivered to the subject during the course of the subject's affliction with the disorder, e.g., the two or more treatments are delivered after the subject has been diagnosed with the disorder and before the disorder has been cured or eliminated or treatment has ceased for other reasons. In some embodiments, the delivery of one treatment is still occurring when the delivery of the second begins, so that there is overlap in terms of administration. This is sometimes referred to herein as “simultaneous” or “concurrent delivery”. The term “concurrently” is not limited to the administration of therapies (e.g., a TBM and an additional agent) at exactly the same time, but rather it is meant that a pharmaceutical composition comprising a TBM of the disclosure is administered to a subject in a sequence and within a time interval such that the TBMs of the disclosure can act together with the additional therapy(ies) to provide an increased benefit than if they were administered otherwise. For example, each therapy may be administered to a subject at the same time or sequentially in any order at different points in time; however, if not administered at the same time, they should be administered sufficiently close in time so as to provide the desired therapeutic effect.

[0553] A TBM of the disclosure and one or more additional agents can be administered simultaneously, in the same or in separate compositions, or sequentially. For sequential administration, the TBM can be administered first, and the additional agent can be administered second, or the order of administration can be reversed.

[0554] The TBM and the additional agent(s) can be administered to a subject in any appropriate form and by any suitable route. In some embodiments, the routes of administration are the same. In other embodiments the routes of administration are different.

[0555] In other embodiments, the delivery of one treatment ends before the delivery of the other treatment begins.

[0556] In some embodiments of either case, the treatment is more effective because of combined administration. For example, the second treatment is more effective, e.g., an equivalent effect is seen with less of the second treatment, or the second treatment reduces symptoms to a greater extent, than would be seen if the second treatment were administered in the absence of the first treatment, or the analogous situation is seen with the first treatment. In some embodiments, delivery is such that the reduction in a symptom, or other parameter related to the disorder is greater than what would be observed with one treatment delivered in the absence of the other. The effect of the two treatments can be partially additive, wholly additive, or greater than additive. The delivery can be such that an effect of the first treatment delivered is still detectable when the second is delivered.

[0557] The TBMs of the disclosure and/or additional agents can be administered during periods of active disorder, or during a period of remission or less active disease. A TBM can be administered before the treatment with the additional agent(s), concurrently with the treatment with the additional agent(s), post-treatment with the additional agent(s), or during remission of the disorder.

[0558] When administered in combination, the TBM and/or the additional agent(s) can be administered in an amount or dose that is higher, lower or the same than the amount or dosage of each agent used individually, e.g., as a monotherapy.

[0559] The additional agent(s) of the combination therapies of the disclosure can be administered to a subject concurrently. The term “concurrently” is not limited to the administration of therapies (e.g., prophylactic or therapeutic agents) at exactly the same time, but rather it is meant that a pharmaceutical composition comprising a TBM of the disclosure is administered to a subject in a sequence and within a time interval such that the molecules of the disclosure can act together with the additional therapy(ies) to provide an increased benefit than if they were administered otherwise. For example, each therapy may be administered to a subject at the same time or sequentially in any order at different points in time; however, if not administered at the same time, they should be administered sufficiently close in time so as to provide the desired therapeutic or prophylactic effect. Each therapy can be administered to a subject separately, in any appropriate form and by any suitable route.

[0560] The TBM and the additional agent(s) may be administered to a subject by the same or different routes of administration.

[0561] The TBMs and the additional agent(s) may be cyclically administered. Cycling therapy involves the administration of a first therapy (e.g., a first prophylactic or therapeutic agent) for a period of time, followed by the administration of a second therapy (e.g., a second prophylactic or therapeutic agent) for a period of time, optionally, followed by the administration of a third therapy (e.g., prophylactic or therapeutic agent) for a period of time and so forth, and repeating this sequential administration, i.e., the cycle in order to reduce the development of resistance to one of the therapies, to avoid or reduce the side effects of one of the therapies, and/or to improve the efficacy of the therapies.

[0562] In certain instances, the one or more additional agents, are other anti-cancer agents, anti-allergic agents, anti-nausea agents (or anti-emetics), pain relievers, cytoprotective agents, and combinations thereof.

[0563] In one embodiment, a TBM of the disclosure can be used in combination with a chemotherapeutic agent. Exemplary chemotherapeutic agents include an anthracycline (e.g., doxorubicin (e.g., liposomal doxorubicin)), a vinca alkaloid (e.g., vinblastine, vincristine, vindesine, vinorelbine), an alkylating agent (e.g., cyclophosphamide, decarbazine, melphalan, ifosfamide, temozolomide), an immune cell antibody (e.g., alemtuzamab, gemtuzumab, rituximab, tositumomab, obinutuzumab, ofatumumab, daratumumab, elotuzumab), an antimetabolite (including, e.g., folic acid antagonists, pyrimidine analogs, purine analogs and adenosine deaminase inhibitors (e.g., fludarabine)), an mTOR inhibitor, a TNFR glucocorticoid induced TNFR related protein (GITR) agonist, a proteasome inhibitor (e.g., aclacinomycin A, gliotoxin or bortezomib), an immunomodulator such as thalidomide or a thalidomide derivative (e.g., lenalidomide).

[0564] General chemotherapeutic agents considered for use in combination therapies include anastrozole (Arimidex®), bicalutamide (Casodex®), bleomycin sulfate (Blenoxane®), busulfan (Myleran®), busulfan injection (Busulfex®), capecitabine (Xeloda®), N4-pentoxycarbonyl-5-deoxy-5-fluorocytidine, carboplatin (Paraplatin®), carmustine (BiCNU®), chlorambucil (Leukeran®), cisplatin (Platinol®), cladribine (Leustatin®), cyclophosphamide (Cytoxan® or Neosar®), cytarabine, cytosine arabinoside (Cytosar-U®), cytarabine liposome injection (DepoCyt®), dacarbazine (DTIC-Dome®), dactinomycin (Actinomycin D, Cosmegan), daunorubicin hydrochloride (Cerubidine®), daunorubicin citrate liposome injection (DaunoXome®), dexamethasone, docetaxel (Taxotere®), doxorubicin hydrochloride (Adriamycin®, Rubex®), etoposide (Vepesid®), fludarabine phosphate (Fludara®), 5-fluorouracil (Adrucil®, Efudex®), flutamide (Eulexin®), tezacitibine, Gemcitabine (difluorodeoxycitidine), hydroxyurea (Hydrea®), Idarubicin (Idamycin®), ifosfamide (IFEX®), irinotecan (Camptosar®), L-asparaginase (ELSPAR®), leucovorin calcium, melphalan (Alkeran®), 6-mercaptopurine (Purinethol®), methotrexate (Folex®), mitoxantrone (Novantrone®), mylotarg, paclitaxel (Taxol®), phoenix (Yttrium90/MX-DTPA), pentostatin, polifeprosan 20 with carmustine implant (Gliadel®), tamoxifen citrate (Nolvadex®), teniposide (Vumon®), 6-thioguanine, thiotepa, tirapazamine (Tirazone®), topotecan hydrochloride for injection (Hycamptin®), vinblastine (Velban®), vincristine (Oncovin®), and vinorelbine (Navelbine®).

[0565] Anti-cancer agents of particular interest for combinations with the TBMs of the present disclosure include: anthracyclines; alkylating agents; antimetabolites; drugs that inhibit either the calcium dependent phosphatase calcineurin or the p70S6 kinase FK506) or inhibit the p70S6 kinase; mTOR inhibitors; immunomodulators; anthracyclines; vinca alkaloids; proteosome inhibitors; GITR agonists; protein tyrosine phosphatase inhibitors; a CDK4 kinase inhibitor; a BTK inhibitor; a MKN kinase inhibitor; a DGK kinase inhibitor; or an oncolytic virus.

[0566] Exemplary alkylating agents include, without limitation, nitrogen mustards, ethylenimine derivatives, alkyl sulfonates, nitrosoureas and triazenes): uracil mustard (Aminouracil Mustard®, Chlorethaminacil®, Demethyldopan®, Desmethyldopan®, Haemanthamine®, Nordopan®, Uracil nitrogen Mustard®, Uracillost®, Uracilmostaza®, Uramustin®, Uramustine®), chlormethine (Mustargen®), cyclophosphamide (Cytoxan®, Neosar®, Clafen®, Endoxan®, Procytox®, Revimmune™), ifosfamide (Mitoxana®), melphalan (Alkeran®), Chlorambucil (Leukeran®), pipobroman (Amedel®, Vercyte®), triethylenemelamine (Hemel®, Hexalen®, Hexastat®), triethylenethiophosphoramine, Temozolomide (Temodar®), thiotepa (Thioplex®), busulfan (Busilvex®, Myleran®), carmustine (BiCNU®), lomustine (CeeNU®), streptozocin (Zanosar®), and Dacarbazine (DTIC-Dome®). Additional exemplary alkylating agents include, without limitation, Oxaliplatin (Eloxatin®); Temozolomide (Temodar® and Temodal®); Dactinomycin (also known as actinomycin-D, Cosmegen®); Melphalan (also known as L-PAM, L-sarcolysin, and phenylalanine mustard, Alkeran®); Altretamine (also known as hexamethylmelamine (HMM), Hexalen®); Carmustine (BiCNU®); Bendamustine (Treanda®); Busulfan (Busulfex® and Myleran®); Carboplatin (Paraplatin®); Lomustine (also known as CCNU, CeeNU®); Cisplatin (also known as CDDP, Platinol® and Platinol®-AQ); Chlorambucil (Leukeran®); Cyclophosphamide (Cytoxan® and Neosar®); Dacarbazine (also known as DTIC, DIC and imidazole carboxamide, DTIC-Dome®); Altretamine (also known as hexamethylmelamine (HMM), Hexalen®); Ifosfamide (Ifex®); Prednumustine; Procarbazine (Matulane®); Mechlorethamine (also known as nitrogen mustard, mustine and mechloroethamine hydrochloride, Mustargen®); Streptozocin (Zanosar®); Thiotepa (also known as thiophosphoamide, TESPA and TSPA, Thioplex®); Cyclophosphamide (Endoxan®, Cytoxan®, Neosar®, Procytox®, Revimmune®); and Bendamustine HCl (Treanda®).

[0567] Exemplary mTOR inhibitors include, e.g., temsirolimus; ridaforolimus (formally known as deferolimus, (1R,2R,4S)-4-[(2R)-2 [(1R,9S,12S,15R,16E,18R,19R,21R, 23S,24E,26E,28Z,30S,32S,35R)-1,18-dihydroxy-19,30-dimethoxy-15,17,21,23, 29,35-hexamethyl-2,3,10,14,20-pentaoxo-11,36-dioxa-4-azatricyclo[30.3.1.04,9] hexatriaconta-16,24,26,28-tetraen-12-yl]propyl]-2-methoxycyclohexyl dimethylphosphinate, also known as AP23573 and MK8669, and described in PCT Publication No. WO 03/064383); everolimus (Afinitor® or RAD001); rapamycin (AY22989, Sirolimus®); simapimod (CAS 164301-51-3); emsirolimus, (5-{2,4-Bis[(3S)-3-methylmorpholin-4-yl]pyrido[2,3-d]pyrimidin-7-yl}-2-methoxyphenyl)methanol (AZD8055); 2-Amino-8-[trans-4-(2-hydroxyethoxy)cyclohexyl]-6-(6-methoxy-3-pyridinyl)-4-methyl-pyrido[2,3-d]pyrimidin-7(8H)-one (PF04691502, CAS 1013101-36-4); and N2-[1,4-dioxo-4-[[4-(4-oxo-8-phenyl-4H-1-benzopyran-2-yl)morpholinium-4-yl]methoxy]butyl]-L-arginylglycyl-L-α-aspartylL-serine- (SEQ ID NO: 718), inner salt (SF1126, CAS 936487-67-1), and XL765.

[0568] Exemplary immunomodulators include, e.g., afutuzumab (available from Roche®); pegfilgrastim (Neulasta®); lenalidomide (CC-5013, Revlimid®); thalidomide (Thalomid®), actimid (CC4047); and IRX-2 (mixture of human cytokines including interleukin 1, interleukin 2, and interferon γ, CAS 951209-71-5, available from IRX Therapeutics).

[0569] Exemplary anthracyclines include, e.g., doxorubicin (Adriamycin® and Rubex®); bleomycin (Lenoxane®); daunorubicin (dauorubicin hydrochloride, daunomycin, and rubidomycin hydrochloride, Cerubidine®); daunorubicin liposomal (daunorubicin citrate liposome, DaunoXome®); mitoxantrone (DHAD, Novantrone®); epirubicin (Ellence™); idarubicin (Idamycin®, Idamycin PFS®); mitomycin C (Mutamycin®); geldanamycin; herbimycin; ravidomycin; and desacetylravidomycin.

[0570] Exemplary vinca alkaloids include, e.g., vinorelbine tartrate (Navelbine®), Vincristine (Oncovin®), and Vindesine (Eldisine®)); vinblastine (also known as vinblastine sulfate, vincaleukoblastine and VLB, Alkaban-AQ® and Velban®); and vinorelbine (Navelbine®).

[0571] Exemplary proteosome inhibitors include bortezomib (Velcade®); carfilzomib (PX-171-007, (S)-4-Methyl-N—((S)-1-(((S)-4-methyl-1-((R)-2-methyloxiran-2-yl)-1-oxopentan-2-yl)amino)-1-oxo-3-phenylpropan-2-yl)-2-((S)-2-(2-morpholinoacetamido)-4-phenylbutanamido)-pentanamide); marizomib (NPI-0052); ixazomib citrate (MLN-9708); delanzomib (CEP-18770); and O-Methyl-N-[(2-methyl-5-thiazolyl)carbonyl]-L-seryl-O-methyl-N-[(1S)-2-[(2R)-2-methyl-2-oxiranyl]-2-oxo-1-(phenylmethyl)ethyl]-L-serinamide (ONX-0912).

[0572] In certain aspects, “cocktails” of different chemotherapeutic agents are administered as the additional agent(s).

### 7. EXAMPLES

### 7.1. Example 1: Production and Characterization of Anti-CD19-Anti-CD3-Anti-CD2 Human IgG1 Bi- and Tri-Specific Antibodies

[0573] 7.1.1. Materials and Methods

[0574] 7.1.1.1. Gene Construction, Expression and Purification of Bi- and Tri-Specific Binding Molecules

[0575] Gene synthesis with mammalian expression codon optimization was performed externally for constructs represented in FIG. 2. Amino acid sequences for the constructs represented in FIG. 2 are shown in Table 15.

TABLE 15
Amino Acid Sequences of Bi- and Tri-specific Constructs

| | | |
|---|---|---|
| | | SEQ |
| Component | Sequence | ID NO: |

Bispecific Ab1
(CD19 scFV/hCD3 scFv 1×1 format)

| | | |
|---|---|---|
| Anti-CD19 scFv | | |
| HCDR1 (Kabat) | DYGVS | 689 |
| HCDR2 (Kabat) | VIWGSETTYYQSSLKS | 692 |
| HCDR3 (Kabat) | HYYYGGSYAMDY | 694 |
| HCDR1 (Chothia) | GVSLPDY | 719 |
| HCDR2 (Chothia) | WGSET | 720 |
| HCDR3 (Chothia) | HYYYGGSYAMDY | 694 |
| HCDR1 (IMGT) | GVSLPDY | 719 |
| HCDR2 (IMGT) | WGSET | 720 |
| HCDR3 (IMGT) | HYYYGGSYAMDY | 694 |
| VH | QVQLQESGPGLVKPSETLSLTCTVSGVSLPDYGVSWIRQ | 700 |
| | PPGKGLEWIGVIWGSETTYYQSSLKSRVTISKDNSKNQVS | |
| | LKLSSVTAADTAVYYCAKHYYYGGSYAMDYWGQGTLVTV | |
| | SS | |
| LCDR1 (Kabat) | RASQDISKYLN | 695 |
| LCDR2 (Kabat) | HTSRLHS | 696 |
| LCDR3 (Kabat) | QQGNTLPYT | 697 |
| LCDR1 (Chothia) | SQDISKY | 721 |
| LCDR2 (Chothia) | HTS | 722 |
| LCDR3 (Chothia) | GNTLPY | 723 |
| LCDR1 (IMGT) | QDISKY | 724 |
| LCDR2 (IMGT) | HTS | 722 |
| LCDR3 (IMGT) | QQGNTLPYT | 697 |
| VL | EIVMTQSPATLSLSPGERATLSCRASQDISKYLNWYQQKP | 703 |
| | GQAPRLLIYHTSRLHSGIPARFSGSGSGTDYTLTISSLQPE | |
| | DFAVYFCQQGNTLPYTFGQGTKLEIK | |
| Linker | GGGGSGGGGSGGGGS | 1 |
| scFv (VH-Iinker-VL) | QVQLQESGPGLVKPSETLSLTCTVSGVSLPDYGVSWIRQ | 707 |
| | PPGKGLEWIGVIWGSETTYYQSSLKSRVTISKDNSKNQVS | |
| | LKLSSVTAADTAVYYCAKHYYYGGSYAMDYWGQGTLVTV | |
| | SSGGGGSGGGGSGGGGSEIVMTQSPATLSLSPGERATL | |
| | SCRASQDISKYLNWYQQKPGQAPRLLIYHTSRLHSGIPAR | |
| | FSGSGSGTDYTLTISSLQPEDFAVYFCQQGNTLPYTFGQ | |
| | GTKLEIK | |
| Anti-CD3 scFv | | |
| HCDR1 (Kabat) | TYAMN | 131 |
| HCDR2 (Kabat) | RIRSKYNNYATYYADSVKD | 151 |
| HCDR3 (Kabat) | HGNFGNSYVSWFAY | 175 |
| HCDR1 (Chothia) | GFTFNTY | 199 |
| HCDR2 (Chothia) | RSKYNNYA | 212 |
| HCDR3 (Chothia) | HGNFGNSYVSWFAY | 175 |
| HCDR1 (IMGT) | GFTFNTYA | 725 |
| HCDR2 (IMGT) | IRSKYNNYAT | 726 |
| HCDR3 (IMGT) | VRHGNFGNSYVSWFAY | 182 |
| VH | EVQLVESGGGLVQPGGSLKLSCAASGFTFNTYAMNWVR | 114 |
| | QASGKGLEWVGRIRSKYNNYATYYADSVKDRFTISRDDS | |
| | KSTLYLQMNSLKTEDTAVYYCVRHGNFGNSYVSWFAYW | |
| | GQGTLVTVSS | |
| LCDR1 (Kabat) | RSSTGAVTTSNYAN | 132 |
| LCDR2 (Kabat) | GTNKRAP | 152 |
| LCDR3 (Kabat) | ALWYSNLWV | 176 |
| LCDR1 (Chothia) | STGAVTTSNY | 200 |
| LCDR2 (Chothia) | GTN | 213 |
| LCDR3 (Chothia) | WYSNLW | 223 |
| LCDR1 (IMGT) | TGAVTTSNY | 727 |
| LCDR2 (IMGT) | GTNKRAPWTP | 728 |
| LCDR3 (IMGT) | ALWYSNLWV | 176 |
| VL | QAWTQEPSLTVSPGGTVTLTCRSSTGAVTTSNYANWVQ | 115 |
| | QKPGQAPRGLIGGTNKRAPWTPARFSGSLLGDKAALTLS | |
| | GAQPEDEAEYFCALWYSNLWVFGGGTKLTVL | |
| Linker | GGGGSGGGGSGGGGSGGGGS | 48 |
| scFv (VH-linker-VL) | EVQLVESGGGLVQPGGSLKLSCAASGFTFNTYAMNWVR | 116 |
| | QASGKGLEWVGRIRSKYNNYATYYADSVKDRFTISRDDS | |
| | KSTLYLQMNSLKTEDTAVYYCVRHGNFGNSYVSWFAYW | |
| | GQGTLVTVSSGGGGSGGGGSGGGGSGGGGSQAVVTQ | |
| | EPSLTVSPGGTVTLTCRSSTGAVTTSNYANWVQQKPGQA | |
| | PRGLIGGTNKRAPWTPARFSGSLLGDKAALTLSGAQPED | |
| | EAEYFCALWYSNLWVFGGGTKLTVL | |
| Full Ab region | | |
| Linker CD19 arm | GGGGS | 25 |
| Fc-HC CD19 arm | DKTHTCPPCPAPELLGGPSVFLFPPKPKDTLMISRTPEVT | 729 |
| | CVVVAVSHEDPEVKFNWYVDGVEVHNAKTKPREEQYNS | |
| | TYRVVSVLTVLHQDWLNGKEYKCKVSNKALAAPIEKTISK | |
| | AKGQPREPQVYTLPPCRDELTKNQVSLWCLVKGFYPSDI | |
| | AVEWESNGQPENNYKTTPPVLDSDGSFFLYSKLTVDKSR | |
| | WQQGNVFSCSVMHEALHNHYTQKSLSLSPGK | |
| Full CD19 arm | QVQLQESGPGLVKPSETLSLTCTVSGVSLPDYGVSWIRQ | 730 |
| | PPGKGLEWIGVIWGSETTYYQSSLKSRVTISKDNSKNQVS | |
| | LKLSSVTAADTAVYYCAKHYYYGGSYAMDYWGQGTLVTV | |
| | SSGGGGSGGGGSGGGGSEIVMTQSPATLSLSPGERATL | |
| | SCRASQDISKYLNWYQQKPGQAPRLLIYHTSRLHSGIPAR | |
| | FSGSGSGTDYTLTISSLQPEDFAVYFCQQGNTLPYTFGQ | |
| | GTKLEIKGGGGSDKTHTCPPCPAPELLGGPSVFLFPPKPK | |
| | DTLMISRTPEVTCVVVAVSHEDPEVKFNWYVDGVEVHNA | |
| | KTKPREEQYNSTYRVVSVLTVLHQDWLNGKEYKCKVSNK | |
| | ALAAPIEKTISKAKGQPREPQVYTLPPCRDELTKNQVSLW | |
| | CLVKGFYPSDIAVEWESNGQPENNYKTTPPVLDSDGSFF | |
| | LYSKLTVDKSRWQQGNVFSCSVMHEALHNHYTQKSLSLS | |
| | PGK | |
| Linker CD3 arm | GGGGS | 25 |
| Fc-HC CD3 arm | DKTHTCPPCPAPELLGGPSVFLFPPKPKDTLMISRTPEVT | 731 |
| | CVVVAVSHEDPEVKFNWYVDGVEVHNAKTKPREEQYNS | |
| | TYRVVSVLTVLHQDWLNGKEYKCKVSNKALAAPIEKTISK | |
| | AKGQPREPQVCTLPPSRDELTKNQVSLSCAVKGFYPSDI | |
| | AVEWESNGQPENNYKTTPPVLDSDGSFFLVSKLTVDKSR | |
| | WQQGNVFSCSVMHEALHNHYTQKSLSLSPGK | |
| Full CD3 arm | EVQLVESGGGLVQPGGSLKLSCAASGFTFNTYAMNWVR | 732 |
| | QASGKGLEWVGRIRSKYNNYATYYADSVKDRFTISRDDS | |
| | KSTLYLQMNSLKTEDTAVYYCVRHGNFGNSYVSWFAYW | |
| | GQGTLVTVSSGGGGSGGGGSGGGGSGGGGSQAVVTQ | |
| | EPSLTVSPGGTVTLTCRSSTGAVTTSNYANWVQQKPGQA | |
| | PRGLIGGTNKRAPWTPARFSGSLLGDKAALTLSGAQPED | |
| | EAEYFCALWYSNLWVFGGGTKLTVLGGGGSDKTHTCPP | |
| | CPAPELLGGPSVFLFPPKPKDTLMISRTPEVTCVVVAVSH | |
| | EDPEVKFNWYVDGVEVHNAKTKPREEQYNSTYRVVSVLT | |
| | VLHQDWLNGKEYKCKVSNKALAAPIEKTISKAKGQPREPQ | |
| | VCTLPPSRDELTKNQVSLSCAVKGFYPSDIAVEWESNGQ | |
| | PENNYKTTPPVLDSDGSFFLVSKLTVDKSRWQQGNVFSC | |
| | SVMHEALHNHYTQKSLSLSPGK | |

Bispecific Ab2
(hCD19 scFv/hCD58 ligand 1×1 format)

| | | |
|---|---|---|
| Anti-CD19 scFv | | |
| HCDR1 (Kabat) | DYGVS | 689 |
| HCDR2 (Kabat) | VIWGSETTYYQSSLKS | 692 |
| HCDR3 (Kabat) | HYYYGGSYAMDY | 694 |
| HCDR1 (Chothia) | GVSLPDY | 719 |
| HCDR2 (Chothia) | WGSET | 720 |
| HCDR3 (Chothia) | HYYYGGSYAMDY | 694 |
| HCDR1 (IMGT) | GVSLPDY | 719 |
| HCDR2 (IMGT) | WGSET | 720 |
| HCDR3 (IMGT) | HYYYGGSYAMDY | 694 |
| VH | QVQLQESGPGLVKPSETLSLTCTVSGVSLPDYGVSWIRQ | 700 |
| | PPGKGLEWIGVIWGSETTYYQSSLKSRVTISKDNSKNQVS | |
| | LKLSSVTAADTAVYYCAKHYYYGGSYAMDYWGQGTLVTV | |
| | SS | |
| LCDR1 (Kabat) | RASQDISKYLN | 695 |
| LCDR2 (Kabat) | HTSRLHS | 696 |
| LCDR3 (Kabat) | QQGNTLPYT | 697 |
| LCDR1 (Chothia) | SQDISKY | 721 |
| LCDR2 (Chothia) | HTS | 722 |
| LCDR3 (Chothia) | GNTLPY | 723 |
| LCDR1 (IMGT) | QDISKY | 724 |
| LCDR2 (IMGT) | HTS | 722 |
| LCDR3 (IMGT) | QQGNTLPYT | 697 |
| VL | EIVMTQSPATLSLSPGERATLSCRASQDISKYLNWYQQKP | 703 |
| | GQAPRLLIYHTSRLHSGIPARFSGSGSGTDYTLTISSLQPE | |
| | DFAVYFCQQGNTLPYTFGQGTKLEIK | |
| Linker | GGGGSGGGGSGGGGS | 1 |
| scFv (VH-linker-VL) | QVQLQESGPGLVKPSETLSLTCTVSGVSLPDYGVSWIRQ | 707 |
| | PPGKGLEWIGVIWGSETTYYQSSLKSRVTISKDNSKNQVS | |
| | LKLSSVTAADTAVYYCAKHYYYGGSYAMDYWGQGTLVTV | |
| | SSGGGGSGGGGSGGGGSEIVMTQSPATLSLSPGERATL | |
| | SCRASQDISKYLNWYQQKPGQAPRLLIYHTSRLHSGIPAR | |
| | FSGSGSGTDYTLTISSLQPEDFAVYFCQQGNTLPYTFGQ | |
| | GTKLEIK | |
| CD58 ligand | | |
| CD58 ligand | FSQQIYGVVYGNVTFHVPSNVPLKEVLWKKQKDKVAELE | 733 |
| | NSEFRAFSSFKNRVYLDTVSGSLTIYNLTSSDEDEYEMES | |
| | PNITDTMKFFLYVLESLPSPTLTCALTNGSIEVQCMIPEHY | |
| | NSHRGLIMYSWDCPMEQCKRNSTSIYFKMENDLPQKIQC | |
| | TLSNPLFNTTSSIILTTCIPSSGHSRHR | |
| Full Ab region | | |
| Linker CD19 arm | GGGGS | 25 |
| Fc-HC CD19 arm | DKTHTCPPCPAPELLGGPSVFLFPPKPKDTLMISRTPEVT | 729 |
| | CVVVAVSHEDPEVKFNWYVDGVEVHNAKTKPREEQYNS | |
| | TYRVVSVLTVLHQDWLNGKEYKCKVSNKALAAPIEKTISK | |
| | AKGQPREPQVYTLPPCRDELTKNQVSLWCLVKGFYPSDI | |
| | AVEWESNGQPENNYKTTPPVLDSDGSFFLYSKLTVDKSR | |
| | WQQGNVFSCSVMHEALHNHYTQKSLSLSPGK | |
| Full CD19 arm | QVQLQESGPGLVKPSETLSLTCTVSGVSLPDYGVSWIRQ | 730 |
| | PPGKGLEWIGVIWGSETTYYQSSLKSRVTISKDNSKNQVS | |
| | LKLSSVTAADTAVYYCAKHYYYGGSYAMDYWGQGTLVTV | |
| | SSGGGGSGGGGSGGGGSEIVMTQSPATLSLSPGERATL | |
| | SCRASQDISKYLNWYQQKPGQAPRLLIYHTSRLHSGIPAR | |
| | FSGSGSGTDYTLTISSLQPEDFAVYFCQQGNTLPYTFGQ | |
| | GTKLEIKGGGGSDKTHTCPPCPAPELLGGPSVFLFPPKPK | |
| | DTLMISRTPEVTCVVVAVSHEDPEVKFNWYVDGVEVHNA | |
| | KTKPREEQYNSTYRVVSVLTVLHQDWLNGKEYKCKVSNK | |
| | ALAAPIEKTISKAKGQPREPQVYTLPPCRDELTKNQVSLW | |
| | CLVKGFYPSDIAVEWESNGQPENNYKTTPPVLDSDGSFF | |
| | LYSKLTVDKSRWQQGNVFSCSVMHEALHNHYTQKSLSLS | |
| | PGK | |
| Linker CD58 arm | GGGGS | 25 |
| Fc-HC CD3 arm | DKTHTCPPCPAPELLGGPSVFLFPPKPKDTLMISRTPEVT | 731 |
| | CVVVAVSHEDPEVKFNWYVDGVEVHNAKTKPREEQYNS | |
| | TYRVVSVLTVLHQDWLNGKEYKCKVSNKALAAPIEKTISK | |
| | AKGQPREPQVCTLPPSRDELTKNQVSLSCAVKGFYPSDI | |
| | AVEWESNGQPENNYKTTPPVLDSDGSFFLVSKLTVDKSR | |
| | WQQGNVFSCSVMHEALHNHYTQKSLSLSPGK | |
| Full CD58 arm | FSQQIYGVVYGNVTFHVPSNVPLKEVLWKKQKDKVAELE | 734 |
| | NSEFRAFSSFKNRVYLDTVSGSLTIYNLTSSDEDEYEMES | |
| | PNITDTMKFFLYVLESLPSPTLTCALTNGSIEVQCMIPEHY | |
| | NSHRGLIMYSWDCPMEQCKRNSTSIYFKMENDLPQKIQC | |
| | TLSNPLFNTTSSIILTTCIPSSGHSRHRGGGGSDKTHTCPP | |
| | CPAPELLGGPSVFLFPPKPKDTLMISRTPEVTCVVVAVSH | |
| | EDPEVKFNWYVDGVEVHNAKTKPREEQYNSTYRVVSVLT | |
| | VLHQDWLNGKEYKCKVSNKALAAPIEKTISKAKGQPREPQ | |
| | VCTLPPSRDELTKNQVSLSCAVKGFYPSDIAVEWESNGQ | |
| | PENNYKTTPPVLDSDGSFFLVSKLTVDKSRWQQGNVFSC | |
| | SVMHEALHNHYTQKSLSLSPGK | |

Trispecific Ab1
(CD19Fab/hCD3 scFv-CD58 ligand 1×1 format)

| | | |
|---|---|---|
| Anti-CD19 Fab | | |
| HCDR1 (Kabat) | DYGVS | 689 |
| HCDR2 (Kabat) | VIWGSETTYYQSSLKS | 692 |
| HCDR3 (Kabat) | HYYYGGSYAMDY | 694 |
| HCDR1 (Chothia) | GVSLPDY | 719 |
| HCDR2 (Chothia) | WGSET | 720 |
| HCDR3 (Chothia) | HYYYGGSYAMDY | 694 |
| HCDR1 (IMGT) | GVSLPDY | 719 |
| HCDR2 (IMGT) | WGSET | 720 |
| HCDR3 (IMGT) | HYYYGGSYAMDY | 694 |
| VH | QVQLQESGPGLVKPSETLSLTCTVSGVSLPDYGVSWIRQ | 700 |
| | PPGKGLEWIGVIWGSETTYYQSSLKSRVTISKDNSKNQVS | |
| | LKLSSVTAADTAVYYCAKHYYYGGSYAMDYWGQGTLVTV | |
| | SS | |
| VH-CH1 Fab fragment | QVQLQESGPGLVKPSETLSLTCTVSGVSLPDYGVSWIRQ | 735 |
| | PPGKGLEWIGVIWGSETTYYQSSLKSRVTISKDNSKNQVS | |
| | LKLSSVTAADTAVYYCAKHYYYGGSYAMDYWGQGTLVTV | |
| | SSASTKGPSVFPLAPSSKSTSGGTAALGCLVKDYFPEPVT | |
| | VSWNSGALTSGVHTFPAVLQSSGLYSLSSVVTVPSSSLG | |
| | TQTYICNVNHKPSNTKVDKRVEPKSC | |
| LCDR1 (Kabat) | RASQDISKYLN | 695 |
| LCDR2 (Kabat) | HTSRLHS | 696 |
| LCDR3 (Kabat) | QQGNTLPYT | 697 |
| LCDR1 (Chothia) | SQDISKY | 721 |
| LCDR2 (Chothia) | HTS | 722 |
| LCDR3 (Chothia) | GNTLPY | 723 |
| LCDR1 (IMGT) | QDISKY | 724 |
| LCDR2 (IMGT) | HTS | 722 |
| LCDR3 (IMGT) | QQGNTLPYT | 697 |
| VL | EIVMTQSPATLSLSPGERATLSCRASQDISKYLNWYQQKP | 703 |
| | GQAPRLLIYHTSRLHSGIPARFSGSGSGTDYTLTISSLQPE | |
| | DFAVYFCQQGNTLPYTFGQGTKLEIK | |
| Light chain | EIVMTQSPATLSLSPGERATLSCRASQDISKYLNWYQQKP | 736 |
| | GQAPRLLIYHTSRLHSGIPARFSGSGSGTDYTLTISSLQPE | |
| | DFAVYFCQQGNTLPYTFGQGTKLEIKRTVAAPSVFIFPPS | |
| | DEQLKSGTASVVCLLNNFYPREAKVQWKVDNALQSGNS | |
| | QESVTEQDSKDSTYSLSSTLTLSKADYEKHKVYACEVTH | |
| | QGLSSPVTKSFNRGEC | |
| Anti-CD3 scFv | | |
| HCDR1 (Kabat) | TYAMN | 131 |
| HCDR2 (Kabat) | RIRSKYNNYATYYADSVKD | 151 |
| HCDR3 (Kabat) | HGNFGNSYVSWFAY | 175 |
| HCDR1 (Chothia) | GFTFNTY | 199 |
| HCDR2 (Chothia) | RSKYNNYA | 212 |
| HCDR3 (Chothia) | HGNFGNSYVSWFAY | 175 |
| HCDR1 (IMGT) | GFTFNTYA | 725 |
| HCDR2 (IMGT) | IRSKYNNYAT | 726 |
| HCDR3 (IMGT) | VRHGNFGNSYVSWFAY | 182 |
| VH | EVQLVESGGGLVQPGGSLKLSCAASGFTFNTYAMNWVR | 114 |
| | QASGKGLEWVGRIRSKYNNYATYYADSVKDRFTISRDDS | |
| | KSTLYLQMNSLKTEDTAVYYCVRHGNFGNSYVSWFAYW | |
| | GQGTLVTVSS | |
| LCDR1 (Kabat) | RSSTGAVTTSNYAN | 132 |
| LCDR2 (Kabat) | GTNKRAP | 152 |
| LCDR3 (Kabat) | ALWYSNLWV | 176 |
| LCDR1 (Chothia) | STGAVTTSNY | 200 |
| LCDR2 (Chothia) | GTN | 213 |
| LCDR3 (Chothia) | WYSNLW | 223 |
| LCDR1 (IMGT) | TGAVTTSNY | 727 |
| LCDR2 (IMGT) | GTNKRAPWTP | 728 |
| LCDR3 (IMGT) | ALWYSNLWV | 176 |
| VL | QAVVTQEPSLTVSPGGTVTLTCRSSTGAVTTSNYANWVQ | 115 |
| | QKPGQAPRGLIGGTNKRAPWTPARFSGSLLGDKAALTLS | |
| | GAQPEDEAEYFCALWYSNLWVFGGGTKLTVL | |
| Linker | GGGGSGGGGSGGGGSGGGGS | 48 |
| scFv (VH-linker-VL) | EVQLVESGGGLVQPGGSLKLSCAASGFTFNTYAMNWVR | 116 |
| | QASGKGLEWVGRIRSKYNNYATYYADSVKDRFTISRDDS | |
| | KSTLYLQMNSLKTEDTAVYYCVRHGNFGNSYVSWFAYW | |
| | GQGTLVTVSSGGGGSGGGGSGGGGSGGGGSQAVVTQ | |
| | EPSLTVSPGGTVTLTCRSSTGAVTTSNYANWVQQKPGQA | |
| | PRGLIGGTNKRAPWTPARFSGSLLGDKAALTLSGAQPED | |
| | EAEYFCALWYSNLWVFGGGTKLTVL | |
| CD58 ligand | | |
| CD58 ligand | FSQQIYGVVYGNVTFHVPSNVPLKEVLWKKQKDKVAELE | 733 |
| | NSEFRAFSSFKNRVYLDTVSGSLTIYNLTSSDEDEYEMES | |
| | PNITDTMKFFLYVLESLPSPTLTCALTNGSIEVQCMIPEHY | |
| | NSHRGLIMYSWDCPMEQCKRNSTSIYFKMENDLPQKIQC | |
| | TLSNPLFNTTSSIILTTCIPSSGHSRHR | |
| Full Ab region | | |
| Linker CD19-CD3 | GGGGSGGGGS | 47 |
| Linker CD3-Fc | GGGGS | 25 |
| Fc-HC CD19 arm | DKTHTCPPCPAPELLGGPSVFLFPPKPKDTLMISRTPEVT | 737 |
| | CVVVAVSHEDPEVKFNWYVDGVEVHNAKTKPREEQYGS | |
| | TYRVVSVLTVLHQDWLNGKEYKCKVSNKALAAPIEKTISK | |
| | AKGQPREPQVCTLPPSRDELTKNQVSLSCAVKGFYPSDI | |
| | AVEWESNGQPENNYKTTPPVLDSDGSFFLVSKLTVDKSR | |
| | WQQGNVFSCSVMHEALHNHYTQKSLSLSPGK | |
| Full CD19-CD3 arm | QVQLQESGPGLVKPSETLSLTCTVSGVSLPDYGVSWIRQ | 738 |
| | PPGKGLEWIGVIWGSETTYYQSSLKSRVTISKDNSKNQVS | |
| | LKLSSVTAADTAVYYCAKHYYYGGSYAMDYWGQGTLVTV | |
| | SSASTKGPSVFPLAPSSKSTSGGTAALGCLVKDYFPEPVT | |
| | VSWNSGALTSGVHTFPAVLQSSGLYSLSSVVTVPSSSLG | |
| | TQTYICNVNHKPSNTKVDKRVEPKSCGGGGSGGGGSEV | |
| | QLVESGGGLVQPGGSLKLSCAASGFTFNTYAMNWVRQA | |
| | SGKGLEWVGRIRSKYNNYATYYADSVKDRFTISRDDSKS | |
| | TLYLQMNSLKTEDTAVYYCVRHGNFGNSYVSWFAYWGQ | |
| | GTLVTVSSGGGGSGGGGSGGGGSGGGGSQAVVTQEPS | |
| | LTVSPGGTVTLTCRSSTGAVTTSNYANWVQQKPGQAPR | |
| | GLIGGTNKRAPWTPARFSGSLLGDKAALTLSGAQPEDEA | |
| | EYFCALWYSNLWVFGGGTKLTVLGGGGSDKTHTCPPCP | |
| | APELLGGPSVFLFPPKPKDTLMISRTPEVTCVVVAVSHED | |
| | PEVKFNWYVDGVEVHNAKTKPREEQYGSTYRVVSVLTVL | |
| | HQDWLNGKEYKCKVSNKALAAPIEKTISKAKGQPREPQV | |
| | CTLPPSRDELTKNQVSLSCAVKGFYPSDIAVEWESNGQP | |
| | ENNYKTTPPVLDSDGSFFLVSKLTVDKSRWQQGNVFSCS | |
| | VMHEALHNHYTQKSLSLSPGK | |
| Linker CD58 ligand | GGGS | 739 |
| Fc CD58 ligand arm | DKTHTCPPCPAPELLGGPSVFLFPPKPKDTLMISRTPEVT | 740 |
| | CVVVDVSHEDPEVKFNWYVDGVEVHNAKTKPREEQYAS | |
| | TYRVVSVLTVLHQDWLNGKEYKCKVSNKALPAPIEKTISK | |
| | AKGQPREPQVYTLPPCREEMTKNQVSLWCLVKGFYPSDI | |
| | AVEWESNGQPENNYKTTPPVLDSDGSFFLYSKLTVDKSR | |
| | WQQGNVFSCSVMHEALHNRYTQKSLSLSPGK | |
| Full CD58 ligand arm | FSQQIYGVVYGNVTFHVPSNVPLKEVLWKKQKDKVAELE | 741 |
| | NSEFRAFSSFKNRVYLDTVSGSLTIYNLTSSDEDEYEMES | |
| | PNITDTMKFFLYVLESLPSPTLTCALTNGSIEVQCMIPEHY | |
| | NSHRGLIMYSWDCPMEQCKRNSTSIYFKMENDLPQKIQC | |
| | TLSNPLFNTTSSIILTTCIPSSGHSRHRGGGSDKTHTCPPC | |
| | PAPELLGGPSVFLFPPKPKDTLMISRTPEVTCVVVDVSHE | |
| | DPEVKFNWYVDGVEVHNAKTKPREEQYASTYRVVSVLTV | |
| | LHQDWLNGKEYKCKVSNKALPAPIEKTISKAKGQPREPQV | |
| | YTLPPCREEMTKNQVSLWCLVKGFYPSDIAVEWESNGQP | |
| | ENNYKTTPPVLDSDGSFFLYSKLTVDKSRWQQGNVFSCS | |
| | VMHEALHNRYTQKSLSLSPGK | |

[0576] Hetero-dimerization of Fc for the trispecific antibody was achieved by the ‘knobs-into-holes’ engineering (Ridgway et al. 1999, Protein Eng. 9(7):617-21). The extracellular domain of human CD58 was fused to human IgG1 Fc with a short flexible linker, while the other arm was encoded with a target binding Fab followed by a short flexible linker, followed by an anti-CD3 scFv, fused to human IgG1 Fc with a short flexible linker such as GGGGS (SEQ ID NO: 25). The corresponding full target light chain plasmid was also synthesized. Constant human IgG1 Fc sequence contained modifications that silence antibody dependent cellular cytotoxicity and facilitate purification of heterodimeric Fc multi-specific antibodies.

[0577] TBMs were expressed transiently in Human Embryonic Kidney (HEK293) cells. Briefly, transfection was performed using PEI (Polyethylenimine, MW 25,000 linear, Cat No. 23966-1, Polysciences, USA) as the transfection reagent. For small scale (≤1 L) transfections, cells were grown in flat-bottomed shake flasks on an orbital shaker (125 rpm) in a 37° C. humidified incubator at 8% CO2. Plasmids were combined with PEI at a final ratio of 1:3=DNA:PEI. 1 mg of plasmid per L culture was used for transfection at 2.0 million cells/mL media. After 5 days of expression, the antibody was harvested by clarification of the media via centrifugation and filtration. Purification was performed via Protein A affinity chromatography (rProtein A Sepharose Fast Flow, GE Healthcare Life Sciences, Uppsala, Sweden) by batch-binding using approximately 5 mL resin/L harvested supernatant. The batch-bound resin slurry was poured over Econo Pac® Chromatography Columns (Cat No. 7321010, BioRad Laboratories, Hercules, Calif.), and the resin bed washed with 10 CV of dPBS. Protein was eluted with 4 CV of 20 mM citrate, 125 mM NaCl, 50 mM sucrose, pH 3.0. The eluted protein was titrated to pH 5.5 with 1 M Sodium Citrate, pH 8.2. If the antibody contained aggregates, preparative size exclusion chromatography was performed using Superdex200 (GE Healthcare Life Sciences, Uppsala, Sweden) as a final polishing step with a mobile phase of 20 mM citrate, 125 mM NaCl, 50 mM sucrose, pH 5.5. Antibody titer, monomer content, and sample endotoxin levels were measured prior to assaying.

[0578] 7.1.1.2. Re-Directed T Cell Cytotoxicity (Quantitative Luciferase Assay)

[0579] In a series of studies, a trispecific construct targeting human CD3, human CD2 and human CD19 was compared with a bispecific construct targeting human CD3 and human CD19 as well as a non-targeting control construct targeting human CD3 and human growth hormone (gH). The constructs were all analyzed for their potential to induce T cell-mediated apoptosis in tumor target cells. The amino acid sequences of the non-targeting control construct targeting human CD3 and gH are shown in Table 16.

TABLE 16
Amino Acid Sequences of anti-CD3 × anti-gH control antibody

| | | SEQ |
|---|---|---|
| Component | Sequence | ID NO: |
| anti-gH scFv-Fc | EVQLVESGGGLVKPGGSLRLSCAASGFTFSPYSVFWWVRQ | 742 |
| | APGKGLEWVSSINTDSTYKYYADSVKGRFTISRDNAENSI | |
| | FLQMNSLRAEDTAVYYCARDRSYYAFSSGSLSDYYYGLD | |
| | VWGQGTLVTVSSGGGGSGGGGSGGGGSGGGGSDIVMT | |
| | QSPLSLSVTPGEPASISCRSSQSLLHTNLYNYLDWYVQKP | |
| | GQSPQLLIYLASNRASGVPDRFSGSGSGTDFTLKISRVET | |
| | EDVGVYYCMQALQIPRTFGQGTKLEIKGGGGSDKTHTCP | |
| | PCPAPELLGGPSVFLFPPKPKDTLMISRTPEVTCVVVAVS | |
| | HEDPEVKFNWYVDGVEVHNAKTKPREEQYNSTYRVVSV | |
| | LTVLHQDWLNGKEYKCKVSNKALAAPIEKTISKAKGQPRE | |
| | PQVYTLPPCRDELTKNQVSLWCLVKGFYPSDIAVEWESN | |
| | GQPENNYKTTPPVLDSDGSFFLYSKLTVDKSRWQQGNVF | |
| | SCSVMHEALHNHYTQKSLSLSPGK | |
| anti-CD3 scFv-Fc | EVQLVESGGGLVQPGGSLKLSCAASGFTFNTYAMNWVR | 732 |
| | QASGKGLEWVGRIRSKYNNYATYYADSVKDRFTISRDDS | |
| | KSTLYLQMNSLKTEDTAVYYCVRHGNFGNSYVSWFAYW | |
| | GQGTLVTVSSGGGGSGGGGSGGGGSGGGGSQAVVTQ | |
| | EPSLTVSPGGTVTLTCRSSTGAVTTSNYANWVQQKPGQA | |
| | PRGLIGGTNKRAPWTPARFSGSLLGDKAALTLSGAQPED | |
| | EAEYFCALVVYSNLWVFGGGTKLTVLGGGGSDKTHTCPP | |
| | CPAPELLGGPSVFLFPPKPKDTLMISRTPEVTCVVVAVSH | |
| | EDPEVKFNWYVDGVEVHNAKTKPREEQYNSTYRVVSVLT | |
| | VLHQDWLNGKEYKCKVSNKALAAPIEKTISKAKGQPREPQ | |
| | VCTLPPSRDELTKNQVSLSCAVKGFYPSDIAVEWESNGQ | |
| | PENNYKTTPPVLDSDGSFFLVSKLTVDKSRWQQGNVFSC | |
| | SVMHEALHNHYTQKSLSLSPGK | |

[0580] The purified constructs were compared across multiple donor effector cells. Briefly, target cells (huCD19-expressing Nalm6 cells, huCD19-expressing Daudi cells, and human K562 cells (negative control)) were engineered to overexpress firefly luciferase. Cells were harvested and resuspended in RPMI medium (Invitrogen #11875-093) with 10% FBS. 10,000 target cells per well were plated in a flat-bottom 96-well plate. Human pan T effector cells were isolated via MACS negative selection (Miltenyi Biotec #130-096-535) from donors from cryopreserved PBMC (Cellular Technologies Limited #CTL-UP1; Hemacare #PB009C-1-AML) then added to the plate to obtain a final E:T ratio of 5:1 or 10:1. Co-cultured cells were incubated with a serial dilution of all constructs and controls. For normalization, average maximum luminescence refers to target cells co-incubated with effector cells, but without any test construct. After an incubation of either 24 or 48 hr at 37° C., 5% CO2, OneGlo luciferase substrate (Promega #E6120) was added to the plate. Luminescence was measured on an Envision plate reader after a 10 minute incubation. Percent specific lysis was calculated using the following equation:

Specific lysis (%)=(1−(sample luminescence/average maximum luminescence))*100

[0581] Studies were also performed in which 10,000 additional target cells were added to the co-cultures to mimic T cell exhaustion at 48 hr, 72 hr, and 96 hr with luciferase based cytotoxicity measurements being made at 48 hr, 72 hr, 96 hr and 120 hr. Additionally, the live cell populations at 48 and 96 hours were analyzed for by FACS for activation markers, checkpoint molecules, and phenotypic markers. Cells treated with 1 nM of the bispecific or trispecific construct were harvested via centrifugation after the first challenge at 48 hours or after the third challenge at 96 hours, and the live cell population was gated through either CD4 or CD8 and analyzed for the activation markers CD25 and CD69 (after the 96 hour challenge), checkpoint molecules PD1, LAG3, and TIM3 (after the 48 hour and 96 hour challenges), and the phenotypic markers CCR7 and CD45RO (after the 48 hour and 96 hour challenges).

[0582] 7.1.1.3. Proliferation Assay

[0583] The purified TBM was tested by flow cytometry for its potential to induce proliferation of CD8+ or CD4+ T cells in the presence of human CD19-expressing Nalm6 tumor cells.

[0584] Briefly, freshly isolated human pan T cells were adjusted to 1 mio cells per ml in warm PBS and stained with 1 μM CellTrace Far Red (Invitrogen #C34564) at 37° C. for 20 minutes. The staining volume was quadrupled by addition of RPM11640 medium, containing 10% FBS. After incubation at 37° C. for an additional 5 min, the cells were washed once with pre-warmed medium to remove remaining dye. The stained effector T cells were adjusted to 1.111×10⁶ viable cells per ml in RPM11640 medium containing 10% FBS and BME. 180 μL of the cell suspension was added per well into a tissue culture treated 24-well plate. Nalm6 target cells were harvested, counted and checked for viability. Cells were adjusted to 0.222×10⁶ viable cells per ml in RPM11640 medium, containing 10% FBS and BME. 180 μL of the cell suspension was added to the plated effector T cells to obtain a final E:T ratio of 5:1. 40 μL of the test constructs were added to the cell-containing wells to obtain a final concentration of either 100, 10, 1 or 0.1 nM. As a positive control, effector T cells were plated in the absence of target cells or test construct with the addition of CD3/CD28 conjugated T-Activator DynaBeads (Invitrogen #111.41D). T cells plated alone with no stimuli served as a negative control.

[0585] After a four day incubation at 37° C., 5% CO2, cells were centrifuged (5 min, 300×g) and washed twice with 150 μL/well PBS, including 0.5% FBS.

[0586] Surface staining for CD8 (mouse IgGI.K; clone HIT8a; BD #555635) or CD4 (mouse IgGI.K; clone RPA-T4; BD #557695) was performed on ice for 1 hr, according to the supplier's suggestions. Cells were washed three times with 200 μL/well PBS containing 0.5% FBS, resuspended in 150 μL/well PBS with 0.5% FBS, and analyzed using a Beckman-Coulter FACS Cytoflex machine (CytExpert Software).

[0587] The live cell population was gated through either CD4 or CD8 for determination of subsequent proliferation of indicated cell type.

[0588] 7.1.1.4. Cytokine Release Assay

[0589] The purified TBM targeting human CD3, human CD2 and human CD19 was analyzed for its ability to induce T cell-mediated de novo secretion of cytokines in the presence or absence of tumor target cells.

[0590] Briefly, huCD19-expressing Nalm6 target cells were harvested and resuspendend in RPMI medium with 10% FBS. 20 000 target cells per well were plated in a flat-bottom 96-well plate. Human pan T effector cells were isolated via MACS negative selection from cryopreserved PBMC then added to the plate to obtain a final E:T ratio of 5:1. Co-cultured cells were incubated with two concentrations of all constructs and controls. After an incubation of 24 hr at 37° C., 5% CO2 the supernatants were harvested by centrifugation at 300×g for 5 min for subsequent analysis.

[0591] A multiplexed ELISA was performed according to the manufacturer's instructions using a V-PLEX Proinflammatory Panel 1 Kit (MesoScale Discovery #K15049D).

[0592] 7.1.1.5. Granzyme B ELISpot Assay

[0593] The purified TBM targeting human CD3, human CD2 and human CD19 was analyzed for its ability to induce Granzyme B secretion in the presence or absence of tumor target cells.

[0594] Briefly, Human pan T effector cells were isolated via MACS negative selection from cryopreserved PBMC. 50 000 effector cells per well were added to an ELISpot plate precoated with anti-Granzyme B antibody (MABTech #3485-4APW) and allowed to settle for 30 min at room temperature. 10 000 huCD19-expressing Nalm6 target cells were harvested and added carefully to the plate so as not to disturb the T cell layer. Co-cultured cells were incubated with two concentrations of all constructs and controls. After an incubation of 48 hr at 37° C., 5% CO2 the plate was washed and detection performed according to the manufacturer's instructions. The plate was dried and submitted for analysis to ZellNet consulting.

[0595] 7.1.2. Results

[0596] 7.1.2.1. Results: Re-Directed T Cell Cytotoxicity Assay

[0597] FIG. 3 shows that the TBM construct induced superior cytotoxicity in huCD19-expressing Nalm6 target cells compared to the bispecific construct in an assay performed with a final E:T ratio of 5:1 and either 24 or 48 hour incubation.

[0598] FIG. 4 shows that the TBM construct induced superior cytotoxic activity in huCD19-expressing Daudi target cells compared to the bispecific construct in an assay performed with a final E:T ratio of 5:1 and 48 hour incubation. As expected, the non-targeting anti-gH showed negligible cytotoxic activity.

[0599] FIG. 5 shows that the bispecific and TBM constructs do not induce apoptosis of the negative control K562 cell line, which does not express human CD19, in an assay performed with a final E:T ratio of 5:1 and 48 hour incubation.

[0600] FIG. 6 shows that the TBM exhibited comparable or superior potency and efficacy compared to the bispecific construct in huCD19-expressing Nalm6 target cells when using human cryopreserved PBMCs that were thawed and rested overnight prior to use and with a final E:T ratio of 10:1 and 24 hour incubation.

[0601] FIG. 7 shows that the TBM construct induced superior cytotoxic activity in huCD19-expressing Nalm6 target cells compared to the bispecific when using human cryopreserved PBMCs from a patient diagnosed with acute myeloid leukemia (Hemacare #PB009C-1-AML) that were thawed and rested overnight prior to use and with a final E:T ratio of 10:1 and 24 hour incubation. As expected, the non-targeting anti-gH showed negligible cytotoxic activity.

[0602] FIGS. 8A-8D shows that in a rechallenge assay with huCD19 expressing Nalm6 target cells, the TBM continued to induce apoptosis up to 120 hours with little apparent loss in activity across each rechallenge while the bispecific construct loses significant potency and activity with each subsequent target cell addition.

[0603] As expected, the non-targeting anti-gH showed negligible cytotoxic activity in each assay.

[0604] Table 17 shows the results of the FACS analysis for the activation markers CD25 and CD69 performed after the third challenge at 96 hours. The trispecific construct mediated higher levels of CD25 and double positive expression (CD25 and CD69) compared to the bispecific construct in both the CD4 and CD8 compartments. Values in Table 17 are expressed as percentage of positive cells.

TABLE 17

| | | | |
|---|---|---|---|
| Activation Marker | No Treatment | Bispecific at 1 nM | Trispecific at 1 nM |

CD4

| | | | |
|---|---|---|---|
| CD25+ | 4 | 3 | 54 |
| CD69+ | 2 | 5 | 10 |
| Double Positive | 0 | 0 | 19 |
| Double Negative | 94 | 92 | 17 |

CD8

| | | | |
|---|---|---|---|
| CD25+ | 0 | 7 | 78 |
| CD69+ | 2 | 13 | 4 |
| Double Positive | 0 | 4 | 6 |
| Double Negative | 98 | 76 | 12 |

[0605] Table 18 shows the results of the FACS analysis for the checkpoint molecules PD1, LAG3 and TIM3 performed after either the first challenge at 48 hours or the third challenge at 96 hours. The trispecific construct mediated higher levels of PD1, LAG3 and TIM3 compared to the bispecific construct in both the CD4 and CD8 compartments. Values in Table 18 are expressed as percentage of positive cells.

TABLE 18

| | Post Challenge 1 at 48 hours | | | Post Challenge 3 at 96 hours | | |
|---|---|---|---|---|---|---|
| Checkpoint | No | Bispecific | Trispecific | No | Bispecific | Trispecific |
| Marker | Treatment | at 1 nM | at 1 nM | Treatment | at 1 nM | at 1 nM |

CD4

| PD1+ | 7 | 12 | 25 | 7 | 5 | 40 |
|---|---|---|---|---|---|---|
| TIM3+ | 5 | 10 | 5 | 0 | 0 | 3 |
| Double | 0 | 2 | 17 | 0 | 0 | 26 |
| Positive | | | | | | |
| Double | 88 | 76 | 53 | 93 | 95 | 31 |
| Negative | | | | | | |
| Activation | No | Bispecific | Trispecific | No | Bispecific | Trispecific |
| Marker | Treatment | at 1 nM | at 1 nM | Treatment | at 1 nM | at 1 nM |

CD4

| PD1+ | 6 | 12 | 18 | 7 | 18 | 24 |
|---|---|---|---|---|---|---|
| LAG3+ | 0 | 0 | 1 | 0 | 0 | 4 |
| Double | 0 | 0 | 23 | 0 | 1 | 10 |
| Positive | | | | | | |
| Double | 94 | 88 | 58 | 93 | 81 | 62 |
| Negative | | | | | | |
| Checkpoint | No | Bispecific | Trispecific | No | Bispecific | Trispecific |
| Marker | Treatment | at 1 nM | at 1 nM | Treatment | at 1 nM | at 1 nM |

CD8

| PD1+ | 8 | 16 | 22 | 13 | 26 | 28 |
|---|---|---|---|---|---|---|
| TIM3+ | 6 | 9 | 8 | 0 | 0 | 12 |
| Double | 0 | 3 | 12 | 0 | 2 | 17 |
| Positive | | | | | | |
| Double | 86 | 72 | 58 | 87 | 72 | 43 |
| Negative | | | | | | |
| Activation | No | Bispecific | Trispecific | No | Bispecific | Trispecific |
| Marker | Treatment | at 1 nM | at 1 nM | Treatment | at 1 nM | at 1 nM |

CD8

| | | | | | | |
|---|---|---|---|---|---|---|
| PD1+ | 11 | 22 | 24 | 7 | 19 | 24 |
| LAG3+ | 1 | 1 | 1 | 0 | 0 | 4 |
| Double | 0 | 0 | 13 | 0 | 0 | 10 |
| Positive | | | | | | |
| Double | 88 | 77 | 62 | 93 | 81 | 62 |
| Negative | | | | | | |

[0606] Table 19 shows the results of the FACS analysis for the phenotypic markers CCR7 and CD45RO performed after the first challenge at 48 hours and the third challenge at 96 hours. The trispecific construct mediated a greater amount of central memory T cells compared to the bispecific construct. Values in Table 19 are expressed as percentage of positive cells.

TABLE 19

| | Post Challenge | | | Post Challenge | | |
|---|---|---|---|---|---|---|
| | 1 at 48 hours | | | 3 at 96 hours | | |
| | | Bi- | Tri- | | Bi- | Tri- |
| | | speci- | speci- | | speci- | speci- |
| | No | fic | fic | No | fic | fic |
| | Treat- | at 1 | at 1 | Treat- | at 1 | at 1 |
| Phenotype | ment | nM | nM | ment | nM | nM |
| CD4 | | | | | | |
| T_{effector} | 1 | 0 | 0 | 1 | 3 | 2 |
| (CCR7- | | | | | | |
| CD45RO−) | | | | | | |
| T_{effector memory} | 28 | 25 | 12 | 46 | 43 | 26 |
| (CCR7- | | | | | | |
| CD45RO+) | | | | | | |
| T_{central memory} | 38 | 47 | 61 | 25 | 18 | 62 |
| (CCR7+ | | | | | | |
| CD45RO+) | | | | | | |
| Tₙₐᵢᵥₑ | 33 | 28 | 27 | 28 | 36 | 10 |
| (CCR7+ | | | | | | |
| CD45RO−) | | | | | | |

[0607] 7.1.2.2. Proliferation Assay

[0608] FIG. 9 shows that the TBM induces proliferation of CD4+ T cells or CD8+ T cells in the presence of target cells in a dose dependent manner. The TBM also appears to induce proliferation of CD8+ T cells to a greater extent than the CD3/CD28 conjugated T-Activator DynaBeads.

[0609] 7.1.2.3. Cytokine Release Assay

[0610] FIG. 10 shows levels of the different cytokine measured in the supernatant. The results show that the trispecific molecule induced production of IFNγ, TNFα, IL2, IL6 and IL10 in human pan T effector cells in the presence of huCD19-expressing Nalm6 target cells. The induction by the CD2-CD3-CD19-targeting TBM was several fold greater than the CD3-CD19 bispecific antibody.

[0611] 7.1.2.4. Results: Granzyme B ELISpot Assay

[0612] FIG. 11 shows that the number of Granzyme B spotforming T cells is much higher upon treatment with the CD2-CD3-CD19-targeting TBM than with the CD3-CD19 bispecific antibody.

### 7.2. Example 2: Anti-CD19-Anti-CD3-Anti-CD2 TBMs with Different CD2 Binding Arms

[0613] Trispecific binding molecules with different anti-human CD2 binding arms were generated and analyzed for their potential to induce T cell-mediated apoptosis in tumor target cells and for their potential to induce nuclear factor of activated T-cells (NFAT) in the absence of target cells.

[0614] 7.2.1. Materials and Methods

[0615] 7.2.1.1. Constructs

[0616] TBM constructs included the TBM of Example 1 having a full length CD58 moiety (AB2-1 in this Example), a TBM having a truncated CD58 comprising the IgV-like domain of CD58 (AB2-2 in this Example), and TBM having an scFv corresponding to the anti-CD2 antibody Medi 507 (AB2-3 in this Example). Amino acid sequences of the TBMs are shown in Table 20. The TBMs are schematically shown in FIG. 12.

TABLE 20
Amino Acid Sequences of TBMs of Example 2

| | | |
|---|---|---|
| | | SEQ |
| Component | Sequence | ID NO: |

AB2-1 (FIG. 12A)
(αCD19-CD58-αCD3)

| | | |
|---|---|---|
| αCD19 Light Chain | EIVMTQSPATLSLSPGERATLSCRASQDISKYLNWYQQKP | 736 |
| | GQAPRLLIYHTSRLHSGIPARFSGSGSGTDYTLTISSLQPE | |
| | DFAVYFCQQGNTLPYTFGQGTKLEIKRTVAAPSVFIFPPS | |
| | DEQLKSGTASVVCLLNNFYPREAKVQWKVDNALQSGNS | |
| | QESVTEQDSKDSTYSLSSTLTLSKADYEKHKVYACEVTH | |
| | QGLSSPVTKSFNRGEC | |
| CD58-Fc | FSQQIYGVVYGNVTFHVPSNVPLKEVLWKKQKDKVAELE | 741 |
| | NSEFRAFSSFKNRVYLDTVSGSLTIYNLTSSDEDEYEMES | |
| | PNITDTMKFFLYVLESLPSPTLTCALTNGSIEVQCMIPEHY | |
| | NSHRGLIMYSWDCPMEQCKRNSTSIYFKMENDLPQKIQC | |
| | TLSNPLFNTTSSIILTTCIPSSGHSRHRGGGSDKTHTCPPC | |
| | PAPELLGGPSVFLFPPKPKDTLMISRTPEVTCVVVDVSHE | |
| | DPEVKFNWYVDGVEVHNAKTKPREEQYASTYRVVSVLTV | |
| | LHQDWLNGKEYKCKVSNKALPAPIEKTISKAKGQPREPQV | |
| | YTLPPCREEMTKNQVSLWCLVKGFYPSDIAVEWESNGQP | |
| | ENNYKTTPPVLDSDGSFFLYSKLTVDKSRWQQGNVFSCS | |
| | VMHEALHNRYTQKSLSLSPGK | |
| αCD19_Fab- | QVQLQESGPGLVKPSETLSLTCTVSGVSLPDYGVSWIRQ | 738 |
| αCD3_scFv-Fc | PPGKGLEWIGVIWGSETTYYQSSLKSRVTISKDNSKNQVS | |
| | LKLSSVTAADTAVYYCAKHYYYGGSYAMDYWGQGTLVTV | |
| | SSASTKGPSVFPLAPSSKSTSGGTAALGCLVKDYFPEPVT | |
| | VSWNSGALTSGVHTFPAVLQSSGLYSLSSVVTVPSSSLG | |
| | TQTYICNVNHKPSNTKVDKRVEPKSCGGGGSGGGGSEV | |
| | QLVESGGGLVQPGGSLKLSCAASGFTFNTYAMNWVRQA | |
| | SGKGLEWVGRIRSKYNNYATYYADSVKDRFTISRDDSKS | |
| | TLYLQMNSLKTEDTAVYYCVRHGNFGNSYVSWFAYWGQ | |
| | GTLVTVSSGGGGSGGGGSGGGGSGGGGSQAVVTQEPS | |
| | LTVSPGGTVTLTCRSSTGAVTTSNYANWVQQKPGQAPR | |
| | GLIGGTNKRAPWTPARFSGSLLGDKAALTLSGAQPEDEA | |
| | EYFCALVVYSNLWVFGGGTKLTVLGGGGSDKTHTCPPCP | |
| | APELLGGPSVFLFPPKPKDTLMISRTPEVTCVVVAVSHED | |
| | PEVKFNWYVDGVEVHNAKTKPREEQYGSTYRVVSVLTVL | |
| | HQDWLNGKEYKCKVSNKALAAPIEKTISKAKGQPREPQV | |
| | CTLPPSRDELTKNQVSLSCAVKGFYPSDIAVEWESNGQP | |
| | ENNYKTTPPVLDSDGSFFLVSKLTVDKSRWQQGNVFSCS | |
| | VMHEALHNHYTQKSLSLSPGK | |

AB2-2 (FIG. 12B)
(αCD19-CD58(IgV)-αCD3)

| | | |
|---|---|---|
| αCD19 Light Chain | EIVMTQSPATLSLSPGERATLSCRASQDISKYLNWYQQKP | 736 |
| | GQAPRLLIYHTSRLHSGIPARFSGSGSGTDYTLTISSLQPE | |
| | DFAVYFCQQGNTLPYTFGQGTKLEIKRTVAAPSVFIFPPS | |
| | DEQLKSGTASVVCLLNNFYPREAKVQWKVDNALQSGNS | |
| | QESVTEQDSKDSTYSLSSTLTLSKADYEKHKVYACEVTH | |
| | QGLSSPVTKSFNRGEC | |
| αCD19_Fab- | QVQLQESGPGLVKPSETLSLTCTVSGVSLPDYGVSWIRQ | 743 |
| αCD3_scFv-Fc | PPGKGLEWIGVIWGSETTYYQSSLKSRVTISKDNSKNQVS | |
| | LKLSSVTAADTAVYYCAKHYYYGGSYAMDYWGQGTLVTV | |
| | SSASTKGPSVFPLAPSSKSTSGGTAALGCLVKDYFPEPVT | |
| | VSWNSGALTSGVHTFPAVLQSSGLYSLSSVVTVPSSSLG | |
| | TQTYICNVNHKPSNTKVDKRVEPKSCGGGGSGGGGSEV | |
| | QLVESGGGLVQPGGSLKLSCAASGFTFNTYAMNWVRQA | |
| | SGKGLEWVGRIRSKYNNYATYYADSVKDRFTISRDDSKS | |
| | TLYLQMNSLKTEDTAVYYCVRHGNFGNSYVSWFAYWGQ | |
| | GTLVTVSSGGGGSGGGGSGGGGSGGGGSQAVVTQEPS | |
| | LTVSPGGTVTLTCRSSTGAVTTSNYANWVQQKPGQAPR | |
| | GLIGGTNKRAPWTPARFSGSLLGDKAALTLSGAQPEDEA | |
| | EYFCALWYSNLWVFGGGTKLTVLGGGGSDKTHTCPPCP | |
| | APELLGGPSVFLFPPKPKDTLMISRTPEVTCVVVAVSHED | |
| | PEVKFNWYVDGVEVHNAKTKPREEQYASTYRVVSVLTVL | |
| | HQDWLNGKEYKCKVSNKALAAPIEKTISKAKGQPREPQV | |
| | CTLPPSREEMTKNQVSLSCAVKGFYPSDIAVEWESNGQP | |
| | ENNYKTTPPVLDSDGSFFLVSKLTVDKSRWQQGNVFSCS | |
| | VMHEALHNHYTQKSLSLSPGK | |
| CD58 IgV-Fc | SQQIYGVVYGNVTFHVPSNVPLKEVLWKKQKDKVAELEN | 744 |
| | SEFRAFSSFKNRVYLDTVSGSLTIYNLTSSDEDEYEMESP | |
| | NITDTMKFFLYVLESGGGGSDKTHTCPPCPAPELLGGPSV | |
| | FLFPPKPKDTLMISRTPEVTCVVVAVSHEDPEVKFNWYVD | |
| | GVEVHNAKTKPREEQYASTYRVVSVLTVLHQDWLNGKEY | |
| | KCKVSNKALAAPIEKTISKAKGQPREPQVYTLPPCREEMT | |
| | KNQVSLWCLVKGFYPSDIAVEWESNGQPENNYKTTPPVL | |
| | DSDGSFFLYSKLTVDKSRWQQGNVFSCSVMHEALHNRY | |
| | TQKSLSLSPGK | |

AB2-3 (FIG. 12C)
(αCD19-Medi507-αCD3)

| | | |
|---|---|---|
| αCD19 Light Chain | EIVMTQSPATLSLSPGERATLSCRASQDISKYLNWYQQKP | 736 |
| | GQAPRLLIYHTSRLHSGIPARFSGSGSGTDYTLTISSLQPE | |
| | DFAVYFCQQGNTLPYTFGQGTKLEIKRTVAAPSVFIFPPS | |
| | DEQLKSGTASVVCLLNNFYPREAKVQWKVDNALQSGNS | |
| | QESVTEQDSKDSTYSLSSTLTLSKADYEKHKVYACEVTH | |
| | QGLSSPVTKSFNRGEC | |
| αCD19_Fab- | QVQLQESGPGLVKPSETLSLTCTVSGVSLPDYGVSWIRQ | 743 |
| αCD3_scFv-Fc | PPGKGLEWIGVIWGSETTYYQSSLKSRVTISKDNSKNQVS | |
| | LKLSSVTAADTAVYYCAKHYYYGGSYAMDYWGQGTLVTV | |
| | SSASTKGPSVFPLAPSSKSTSGGTAALGCLVKDYFPEPVT | |
| | VSWNSGALTSGVHTFPAVLQSSGLYSLSSVVTVPSSSLG | |
| | TQTYICNVNHKPSNTKVDKRVEPKSCGGGGSGGGGSEV | |
| | QLVESGGGLVQPGGSLKLSCAASGFTFNTYAMNWVRQA | |
| | SGKGLEWVGRIRSKYNNYATYYADSVKDRFTISRDDSKS | |
| | TLYLQMNSLKTEDTAVYYCVRHGNFGNSYVSWFAYWGQ | |
| | GTLVTVSSGGGGSGGGGSGGGGSGGGGSQAVVTQEPS | |
| | LTVSPGGTVTLTCRSSTGAVTTSNYANWVQQKPGQAPR | |
| | GLIGGTNKRAPWTPARFSGSLLGDKAALTLSGAQPEDEA | |
| | EYFCALWYSNLWVFGGGTKLTVLGGGGSDKTHTCPPCP | |
| | APELLGGPSVFLFPPKPKDTLMISRTPEVTCVVVAVSHED | |
| | PEVKFNWYVDGVEVHNAKTKPREEQYASTYRVVSVLTVL | |
| | HQDWLNGKEYKCKVSNKALAAPIEKTISKAKGQPREPQV | |
| | CTLPPSREEMTKNQVSLSCAVKGFYPSDIAVEWESNGQP | |
| | ENNYKTTPPVLDSDGSFFLVSKLTVDKSRWQQGNVFSCS | |
| | VMHEALHNHYTQKSLSLSPGK | |
| Medi 507 scFv-Fc | QVQLVQSGAEVQRPGASVKVSCKASGYIFTEYYMYWVR | 745 |
| | QAPGQGLELVGRIDPEDGSIDYVEKFKKKVTLTADTSSST | |
| | AYMELSSLTSDDTAVYYCARGKFNYRFAYWGQGTLVTVS | |
| | SGGGGSGGGGSGGGGSGGGGSDVVMTQSPPSLLVTLG | |
| | QPASISCRSSQSLLHSSGNTYLNWLLQRPGQSPQPLIYLV | |
| | SKLESGVPDRFSGSGSGTDFTLKISGVEAEDVGVYYCMQ | |
| | FTHYPYTFGQGTKLEIKGGGGSDKTHTCPPCPAPELLGG | |
| | PSVFLFPPKPKDTLMISRTPEVTCVVVAVSHEDPEVKFNW | |
| | YVDGVEVHNAKTKPREEQYNSTYRVVSVLTVLHQDWLN | |
| | GKEYKCKVSNKALAAPIEKTISKAKGQPREPQVCTLPPSR | |
| | DELTKNQVSLSCAVKGFYPSDIAVEWESNGQPENNYKTT | |
| | PPVLDSDGSFFLVSKLTVDKSRWQQGNVFSCSVMHEALH | |
| | NHYTQKSLSLSPGK | |

[0617] 7.2.1.2. Re-Directed T Cell Cytotoxicity Assay

[0618] A re-directed T cell cytotoxicity assay was performed on the TBMs as described in Example 1, using human CD-19 expressing Nalm6 target cells at an E:T ratio of 5:1 and an incubation time of 48 hours.

[0619] A re-directed T cell cytotoxicity assay was also performed with AB2-2 using cynomolgus monkey pan T effector cells isolated via MACS negative selection (Miltenyi Biotec #130-091-993) from cryopreserved PBMC (iQ Biosciences #IQB-MnPB102). The cynomolgus monkey pan T effector cells were used in the assay at an E:T ratio of 5:1 and an incubation time of 48 hr.

[0620] 7.2.1.3. NFAT Activation Assay

[0621] A Jurkat-NFAT reporter cell line can be used to evaluate the functional activity of trispecific constructs, specifically the non-specific activation of N FAT. Jurkat cells (cell line E6-1) stably expressing a NFAT-LUC reporter (JNL) were grown in RPMI-1640 media containing 2 mM glutamine and 10% fetal bovine serum with puromycin at 0.5 ug/ml. 100,000 JNL cells per well were plated in a flat-bottom 96-well plate and were incubated with a serial dilution of all constructs and controls. After an incubation of 6 hr at 37° C., 5% CO2, OneGlo luciferase substrate (Promega #E6120) was added to the plate. Luminescence was measured on an Envision plate reader after a 10 minute incubation.

[0622] 7.2.2. Results

[0623] The results of the re-directed T cell cytotoxicity assay performed with Nalm6 target cells and human Pan T effector cells are shown in FIG. 13. The trispecific construct with the truncated CD58 IgV only domain (AB2-2) was observed to have similar cytotoxic activity to the trispecific construct having the full length CD58 molecule (AB2-1). The trispecific construct comprising a Medi 507 scFv (AB2-3) was observed in this assay to have superior cytotoxic activity compared to the trispecific constructs comprising a CD58 moiety.

[0624] The results of the re-directed T cell cytotoxicity assay performed with Nalm6 target cells and cynomolgus monkey pan T effector cells are shown in FIG. 14. TBM AB2-2 exhibited superior cytotoxic activity in huCD19-expressing Nalm6 target cells compared to the bispecific molecule.

[0625] The results of the NFAT activation assay are shown in FIG. 15. The construct with truncated CD58 IgV only domain (AB2-2) was observed to induce less NFAT activation compared to the construct with the full length CD58 molecule (AB2-1). The construct having a scFv corresponding to the anti-CD2 antibody Medi 507 (AB2-3) showed a much greater induction of NFAT, indicating a higher potential for non-specific activation compared to the CD58 comprising trispecifics.

### 7.3. Example 3: Alternative Format Anti-CD19-Anti-CD3-Anti-CD2 TBMs

[0626] 7.3.1. Materials and Methods

[0627] Trispecific binding molecules with various TBM formats were generated and analyzed for their potential to induce T cell-mediated apoptosis in tumor target cells. The TBM constructs included the TBM having the CD58 IgV domain from Example 2 (AB3-1 in this Example), a TBM having CD58 IgV domain N-terminal to an anti-CD3 scFab and an anti-CD19Fab (AB3-2), a TBM having CD58 IgV domain N-terminal to an anti-CD3 scFv, and an anti-CD19Fab (AB3-3), a TBM having an anti-CD3 scFv N-terminal to a CD58 IgV domain, and an anti-CD19 Fab (AB4-4), and a TBM having an anti-CD3 scFV, a C-terminal CD58 IgV domain, and an anti-CD19 Fab (AB4-5). Amino acid sequences of the TBMs of this Example are shown in Table 21. The TBMs are schematically shown in FIG. 16.

TABLE 21
Amino Acid Sequences of TBMs of Example 3

| | | |
|---|---|---|
| | | SEQ |
| Component | Sequence | ID NO: |

AB3-1 (FIG. 16A)
(αCD19-CD58(IgV)-αCD3)

| | | |
|---|---|---|
| Anti-CD19 Light | EIVMTQSPATLSLSPGERATLSCRASQDISKYLNWYQQKP | 736 |
| Chain | GQAPRLLIYHTSRLHSGIPARFSGSGSGTDYTLTISSLQPE | |
| | DFAVYFCQQGNTLPYTFGQGTKLEIKRTVAAPSVFIFPPS | |
| | DEQLKSGTASVVCLLNNFYPREAKVQWKVDNALQSGNS | |
| | QESVTEQDSKDSTYSLSSTLTLSKADYEKHKVYACEVTH | |
| | QGLSSPVTKSFNRGEC | |
| Anti-CD19 Fab-Anti- | QVQLQESGPGLVKPSETLSLTCTVSGVSLPDYGVSWIRQ | 738 |
| CD3_scFv-Fc | PPGKGLEWIGVIWGSETTYYQSSLKSRVTISKDNSKNQVS | |
| | LKLSSVTAADTAVYYCAKHYYYGGSYAMDYWGQGTLVTV | |
| | SSASTKGPSVFPLAPSSKSTSGGTAALGCLVKDYFPEPVT | |
| | VSWNSGALTSGVHTFPAVLQSSGLYSLSSVVTVPSSSLG | |
| | TQTYICNVNHKPSNTKVDKRVEPKSCGGGGSGGGGSEV | |
| | QLVESGGGLVQPGGSLKLSCAASGFTFNTYAMNWVRQA | |
| | SGKGLEWVGRIRSKYNNYATYYADSVKDRFTISRDDSKS | |
| | TLYLQMNSLKTEDTAVYYCVRHGNFGNSYVSWFAYWGQ | |
| | GTLVTVSSGGGGSGGGGSGGGGSGGGGSQAVVTQEPS | |
| | LTVSPGGTVTLTCRSSTGAVTTSNYANWVQQKPGQAPR | |
| | GLIGGTNKRAPWTPARFSGSLLGDKAALTLSGAQPEDEA | |
| | EYFCALWYSNLWVFGGGTKLTVLGGGGSDKTHTCPPCP | |
| | APELLGGPSVFLFPPKPKDTLMISRTPEVTCVVVAVSHED | |
| | PEVKFNWYVDGVEVHNAKTKPREEQYGSTYRVVSVLTVL | |
| | HQDWLNGKEYKCKVSNKALAAPIEKTISKAKGQPREPQV | |
| | CTLPPSRDELTKNQVSLSCAVKGFYPSDIAVEWESNGQP | |
| | ENNYKTTPPVLDSDGSFFLVSKLTVDKSRWQQGNVFSCS | |
| | VMHEALHNHYTQKSLSLSPGK | |
| CD58 IgV-Fc | FSQQIYGVVYGNVTFHVPSNVPLKEVLWKKQKDKVAELE | 746 |
| | NSEFRAFSSFKNRVYLDTVSGSLTIYNLTSSDEDEYEMES | |
| | PNITDTMKFFLYVLESGGGGSDKTHTCPPCPAPELLGGPS | |
| | VFLFPPKPKDTLMISRTPEVTCVVVDVSHEDPEVKFNWYV | |
| | DGVEVHNAKTKPREEQYASTYRVVSVLTVLHQDWLNGKE | |
| | YKCKVSNKALPAPIEKTISKAKGQPREPQVYTLPPCREEM | |
| | TKNQVSLWCLVKGFYPSDIAVEWESNGQPENNYKTTPPV | |
| | LDSDGSFFLYSKLTVDKSRWQQGNVFSCSVMHEALHNR | |
| | YTQKSLSLSPGK | |

AB3-2 (FIG. 16B)
(CD58-αCD3Fab-αCD19Fab)

| | | |
|---|---|---|
| Anti-CD19 Heavy | QVQLQESGPGLVKPSETLSLTCTVSGVSLPDYGVSWIRQ | 747 |
| Chain | PPGKGLEWIGVIWGSETTYYQSSLKSRVTISKDNSKNQVS | |
| | LKLSSVTAADTAVYYCAKHYYYGGSYAMDYWGQGTLVTV | |
| | SSASTKGPSVFPLAPSSKSTSGGTAALGCLVKDYFPEPVT | |
| | VSWNSGALTSGVHTFPAVLQSSGLYSLSSVVTVPSSSLG | |
| | TQTYICNVNHKPSNTKVDKRVEPKSCDKTHTCPPCPAPEL | |
| | LGGPSVFLFPPKPKDTLMISRTPEVTCVVVDVSHEDPEVK | |
| | FNWYVDGVEVHNAKTKPREEQYASTYRVVSVLTVLHQD | |
| | WLNGKEYKCKVSNKALPAPIEKTISKAKGQPREPQVCTLP | |
| | PSREEMTKNQVSLSCAVKGFYPSDIAVEWESNGQPENNY | |
| | KTTPPVLDSDGSFFLVSKLTVDKSRWQQGNVFSCSVMHE | |
| | ALHNHYTQKSLSLSPGK | |
| CD58-CD3_Fab-Fc | SQQIYGVVYGNVTFHVPSNVPLKEVLWKKQKDKVAELEN | 748 |
| | SEFRAFSSFKNRVYLDTVSGSLTIYNLTSSDEDEYEMESP | |
| | NITDTMKFFLYVLESLPSPTLTCALTNGSIEVQCMIPEHYN | |
| | SHRGLIMYSWDCPMEQCKRNSTSIYFKMENDLPQKIQCT | |
| | LSNPLFNTTSSIILTTCIPSSGHSRHRGGGGSGGGGSQAV | |
| | VTQEPSLTVSPGGTVTLTCRSSTGAVTTSNYANWVQQKP | |
| | GQAPRGLIGGTNKRAPWTPARFSGSLLGDKAALTLSGAQ | |
| | PEDEAEYFCALWYSNLWVFGGGTKLTVLGQPKAAPSVTL | |
| | FPPSSEELQANKATLVCLISDFYPGAVTVAWKADSSPVKA | |
| | GVETTTPSKQSNNKYAASSYLSLTPEQWKSHRSYSCQVT | |
| | HEGSTVEKTVAPTECSGSDKTHTCPPCPAPELLGGPSVF | |
| | LFPPKPKDTLMISRTPEVTCVVVDVSHEDPEVKFNWYVD | |
| | GVEVHNAKTKPREEQYASTYRVVSVLTVLHQDWLNGKEY | |
| | KCKVSNKALPAPIEKTISKAKGQPREPQVYTLPPCREEMT | |
| | KNQVSLWCLVKGFYPSDIAVEWESNGQPENNYKTTPPVL | |
| | DSDGSFFLYSKLTVDKSRWQQGNVFSCSVMHEALHNRY | |
| | TQKSLSLSPGK | |
| Anti-CD19 Light | EIVMTQSPATLSLSPGERATLSCRASQDISKYLNWYQQKP | 736 |
| Chain | GQAPRLLIYHTSRLHSGIPARFSGSGSGTDYTLTISSLQPE | |
| | DFAVYFCQQGNTLPYTFGQGTKLEIKRTVAAPSVFIFPPS | |
| | DEQLKSGTASVVCLLNNFYPREAKVQWKVDNALQSGNS | |
| | QESVTEQDSKDSTYSLSSTLTLSKADYEKHKVYACEVTH | |
| | QGLSSPVTKSFNRGEC | |
| Anti-CD3 Light Chain | EVQLVESGGGLVQPGGSLKLSCAASGFTFNTYAMNWVR | 749 |
| | QASGKGLEWVGRIRSKYNNYATYYADSVKDRFTISRDDS | |
| | KSTLYLQMNSLKTEDTAVYYCVRHGNFGNSYVSWFAYW | |
| | GQGTLVTVSSASTKGPSVFPLAPSSKSTSGGTAALGCLV | |
| | KDYFPEPVTVSWNSGALTSGVHTFPAVLQSSGLYSLSSV | |
| | VTVPSSSLGTQTYICNVNHKPSNTKVDKRVEPKSC | |

AB3-3 (FIG. 16C)
(CD58-αCD3scFv-αCD19Fab)

| | | |
|---|---|---|
| Anti-CD19 Light | EIVMTQSPATLSLSPGERATLSCRASQDISKYLNWYQQKP | 736 |
| Chain | GQAPRLLIYHTSRLHSGIPARFSGSGSGTDYTLTISSLQPE | |
| | DFAVYFCQQGNTLPYTFGQGTKLEIKRTVAAPSVFIFPPS | |
| | DEQLKSGTASVVCLLNNFYPREAKVQWKVDNALQSGNS | |
| | QESVTEQDSKDSTYSLSSTLTLSKADYEKHKVYACEVTH | |
| | QGLSSPVTKSFNRGEC | |
| Anti-CD19 Heavy | QVQLQESGPGLVKPSETLSLTCTVSGVSLPDYGVSWIRQ | 747 |
| Chain | PPGKGLEWIGVIWGSETTYYQSSLKSRVTISKDNSKNQVS | |
| | LKLSSVTAADTAVYYCAKHYYYGGSYAMDYWGQGTLVTV | |
| | SSASTKGPSVFPLAPSSKSTSGGTAALGCLVKDYFPEPVT | |
| | VSWNSGALTSGVHTFPAVLQSSGLYSLSSVVTVPSSSLG | |
| | TQTYICNVNHKPSNTKVDKRVEPKSCDKTHTCPPCPAPEL | |
| | LGGPSVFLFPPKPKDTLMISRTPEVTCVVVDVSHEDPEVK | |
| | FNWYVDGVEVHNAKTKPREEQYASTYRVVSVLTVLHQD | |
| | WLNGKEYKCKVSNKALPAPIEKTISKAKGQPREPQVCTLP | |
| | PSREEMTKNQVSLSCAVKGFYPSDIAVEWESNGQPENNY | |
| | KTTPPVLDSDGSFFLVSKLTVDKSRWQQGNVFSCSVMHE | |
| | ALHNHYTQKSLSLSPGK | |
| CD58_AntiCD3scFv- | SQQIYGVVYGNVTFHVPSNVPLKEVLWKKQKDKVAELEN | 750 |
| Fc | SEFRAFSSFKNRVYLDTVSGSLTIYNLTSSDEDEYEMESP | |
| | NITDTMKFFLYVLESLPSPTLTCALTNGSIEVQCMIPEHYN | |
| | SHRGLIMYSWDCPMEQCKRNSTSIYFKMENDLPQKIQCT | |
| | LSNPLFNTTSSIILTTCIPSSGHSRHRGGGGSGGGGSEVQ | |
| | LVESGGGLVQPGGSLKLSCAASGFTFNTYAMNWVRQAS | |
| | GKGLEWVGRIRSKYNNYATYYADSVKDRFTISRDDSKSTL | |
| | YLQMNSLKTEDTAVYYCVRHGNFGNSYVSWFAYWGQGT | |
| | LVTVSSGGGGSGGGGSGGGGSGGGGSQAVVTQEPSLT | |
| | VSPGGTVTLTCRSSTGAVTTSNYANWVQQKPGQAPRGLI | |
| | GGTNKRAPWTPARFSGSLLGDKAALTLSGAQPEDEAEYF | |
| | CALWYSNLWVFGGGTKLTVLGGGGSDKTHTCPPCPAPE | |
| | LLGGPSVFLFPPKPKDTLMISRTPEVTCVVVDVSHEDPEV | |
| | KFNWYVDGVEVHNAKTKPREEQYASTYRVVSVLTVLHQD | |
| | WLNGKEYKCKVSNKALPAPIEKTISKAKGQPREPQVYTLP | |
| | PCREEMTKNQVSLWCLVKGFYPSDIAVEWESNGQPENN | |
| | YKTTPPVLDSDGSFFLYSKLTVDKSRWQQGNVFSCSVMH | |
| | EALHNRYTQKSLSLSPGK | |

AB3-4 (FIG. 16D)
(αCD3-CD58-αCD19Fab)

| | | |
|---|---|---|
| Anti-CD19 Light | EIVMTQSPATLSLSPGERATLSCRASQDISKYLNWYQQKP | 736 |
| Chain | GQAPRLLIYHTSRLHSGIPARFSGSGSGTDYTLTISSLQPE | |
| | DFAVYFCQQGNTLPYTFGQGTKLEIKRTVAAPSVFIFPPS | |
| | DEQLKSGTASVVCLLNNFYPREAKVQWKVDNALQSGNS | |
| | QESVTEQDSKDSTYSLSSTLTLSKADYEKHKVYACEVTH | |
| | QGLSSPVTKSFNRGEC | |
| Anti-CD19 Heavy | QVQLQESGPGLVKPSETLSLTCTVSGVSLPDYGVSWIRQ | 747 |
| Chain | PPGKGLEWIGVIWGSETTYYQSSLKSRVTISKDNSKNQVS | |
| | LKLSSVTAADTAVYYCAKHYYYGGSYAMDYWGQGTLVTV | |
| | SSASTKGPSVFPLAPSSKSTSGGTAALGCLVKDYFPEPVT | |
| | VSWNSGALTSGVHTFPAVLQSSGLYSLSSVVTVPSSSLG | |
| | TQTYICNVNHKPSNTKVDKRVEPKSCDKTHTCPPCPAPEL | |
| | LGGPSVFLFPPKPKDTLMISRTPEVTCVVVDVSHEDPEVK | |
| | FNWYVDGVEVHNAKTKPREEQYASTYRVVSVLTVLHQD | |
| | WLNGKEYKCKVSNKALPAPIEKTISKAKGQPREPQVCTLP | |
| | PSREEMTKNQVSLSCAVKGFYPSDIAVEWESNGQPENNY | |
| | KTTPPVLDSDGSFFLVSKLTVDKSRWQQGNVFSCSVMHE | |
| | ALHNHYTQKSLSLSPGK | |
| AntiCD3scFv-CD58- | EVQLVESGGGLVQPGGSLKLSCAASGFTFNTYAMNWVR | 751 |
| Fc | QASGKGLEWVGRIRSKYNNYATYYADSVKDRFTISRDDS | |
| | KSTLYLQMNSLKTEDTAVYYCVRHGNFGNSYVSWFAYW | |
| | GQGTLVTVSSGGGGSGGGGSGGGGSGGGGSQAVVTQ | |
| | EPSLTVSPGGTVTLTCRSSTGAVTTSNYANWVQQKPGQA | |
| | PRGLIGGTNKRAPWTPARFSGSLLGDKAALTLSGAQPED | |
| | EAEYFCALWYSNLWVFGGGTKLTVLGGGGSGGGGSSQ | |
| | QIYGVVYGNVTFHVPSNVPLKEVLWKKQKDKVAELENSE | |
| | FRAFSSFKNRVYLDTVSGSLTIYNLTSSDEDEYEMESPNIT | |
| | DTMKFFLYVLESLPSPTLTCALTNGSIEVQCMIPEHYNSHR | |
| | GLIMYSWDCPMEQCKRNSTSIYFKMENDLPQKIQCTLSN | |
| | PLFNTTSSIILTTCIPSSGHSRHRGSDKTHTCPPCPAPELL | |
| | GGPSVFLFPPKPKDTLMISRTPEVTCVVVDVSHEDPEVKF | |
| | NWYVDGVEVHNAKTKPREEQYASTYRVVSVLTVLHQDW | |
| | LNGKEYKCKVSNKALPAPIEKTISKAKGQPREPQVYTLPP | |
| | CREEMTKNQVSLWCLVKGFYPSDIAVEWESNGQPENNY | |
| | KTTPPVLDSDGSFFLYSKLTVDKSRWQQGNVFSCSVMHE | |
| | ALHNRYTQKSLSLSPGK | |

AB3-5 (FIG. 16E)
(αCD3scFv-αCD19Fab-Fc-CD58)

| | | |
|---|---|---|
| Anti-CD19 Light | EIVMTQSPATLSLSPGERATLSCRASQDISKYLNWYQQKP | 736 |
| Chain | GQAPRLLIYHTSRLHSGIPARFSGSGSGTDYTLTISSLQPE | |
| | DFAVYFCQQGNTLPYTFGQGTKLEIKRTVAAPSVFIFPPS | |
| | DEQLKSGTASVVCLLNNFYPREAKVQWKVDNALQSGNS | |
| | QESVTEQDSKDSTYSLSSTLTLSKADYEKHKVYACEVTH | |
| | QGLSSPVTKSFNRGEC | |
| Anti-CD19 Heavy | QVQLQESGPGLVKPSETLSLTCTVSGVSLPDYGVSWIRQ | 747 |
| Chain | PPGKGLEWIGVIWGSETTYYQSSLKSRVTISKDNSKNQVS | |
| | LKLSSVTAADTAVYYCAKHYYYGGSYAMDYWGQGTLVTV | |
| | SSASTKGPSVFPLAPSSKSTSGGTAALGCLVKDYFPEPVT | |
| | VSWNSGALTSGVHTFPAVLQSSGLYSLSSVVTVPSSSLG | |
| | TQTYICNVNHKPSNTKVDKRVEPKSCDKTHTCPPCPAPEL | |
| | LGGPSVFLFPPKPKDTLMISRTPEVTCVVVDVSHEDPEVK | |
| | FNWYVDGVEVHNAKTKPREEQYASTYRVVSVLTVLHQD | |
| | WLNGKEYKCKVSNKALPAPIEKTISKAKGQPREPQVCTLP | |
| | PSREEMTKNQVSLSCAVKGFYPSDIAVEWESNGQPENNY | |
| | KTTPPVLDSDGSFFLVSKLTVDKSRWQQGNVFSCSVMHE | |
| | ALHNHYTQKSLSLSPGK | |
| AntiCD3 scFv-Fc- | EVQLVESGGGLVQPGGSLKLSCAASGFTFNTYAMNWVR | 752 |
| CD58 | QASGKGLEWVGRIRSKYNNYATYYADSVKDRFTISRDDS | |
| | KSTLYLQMNSLKTEDTAVYYCVRHGNFGNSYVSWFAYW | |
| | GQGTLVTVSSGGGGSGGGGSGGGGSGGGGSQAVVTQ | |
| | EPSLTVSPGGTVTLTCRSSTGAVTTSNYANWVQQKPGQA | |
| | PRGLIGGTNKRAPWTPARFSGSLLGDKAALTLSGAQPED | |
| | EAEYFCALWYSNLWVFGGGTKLTVLGGGGSDKTHTCPP | |
| | CPAPELLGGPSVFLFPPKPKDTLMISRTPEVTCVVVDVSH | |
| | EDPEVKFNWYVDGVEVHNAKTKPREEQYASTYRVVSVLT | |
| | VLHQDWLNGKEYKCKVSNKALPAPIEKTISKAKGQPREPQ | |
| | VYTLPPCREEMTKNQVSLWCLVKGFYPSDIAVEWESNGQ | |
| | PENNYKTTPPVLDSDGSFFLYSKLTVDKSRWQQGNVFSC | |
| | SVMHEALHNHYTQKSLSLSPGKGGGGSGGGGSGGGGS | |
| | GGGGSSQQIYGVVYGNVTFHVPSNVPLKEVLWKKQKDK | |
| | VAELENSEFRAFSSFKNRVYLDTVSGSLTIYNLTSSDEDE | |
| | YEMESPNITDTMKFFLYVLESLPSPTLTCALTNGSIEVQCM | |
| | IPEHYNSHRGLIMYSWDCPMEQCKRNSTSIYFKMENDLP | |
| | QKIQCTLSNPLFNTTSSIILTTCIPSSGHSRHR | |

[0628] Re-directed T cell cytotoxicity assays were performed on the TBMs as described in Example 1, using human CD-19 expressing Nalm6 target cells at an E:T ratio of 5:1 and an incubation time of 48 hours.

[0629] A NFAT activation assay to assess non-specific NFAT activation of the constructs was performed as described in Example 2.

[0630] 7.3.2. Results

[0631] The results of the re-directed T cell cytotoxicity assay are shown in FIG. 17. The TBM with the truncated CD58 IgV only domain on the C-terminus (AB3-5) displayed similar cytotoxic activity to trispecific AB3-1. The other alternative formats showed inferior activity.

[0632] The results of the NFAT activation assay are shown in FIG. 18. The trispecific construct with the truncated CD58 IgV only domain on the C-terminus (AB3-5) displayed greater induction of NFAT compared to the other constructs. The original format (AB3-1) showed the lowest induction of NFAT.

### 7.4. Example 4: Anti-CD19-Anti-CD3-Anti-CD2 TBMs with Different CD19 Binding Arm Configurations

[0633] 7.4.1. Materials and Methods

[0634] Trispecific binding molecules with different anti-CD19 arm configurations were analyzed for their potential to induce T cell-mediated apoptosis in tumor target cells. Constructs included the TBM having an anti-CD19 Fab N-terminal to an anti-CD3 scFV, and a CD58 IgV domain (the same construct as AB2-2 and AB3-1, labeled AB4-1 in this Example), a TBM having an anti-CD3scFv, a C-terminal anti-CD19 scFv, and a CD58 IgV domain (AB4-2), and a TBM having an anti-CD3scFv, a C-terminal anti-CD19 Fab, and a CD58 IgV domain (AB4-3). Amino acid sequences of the TBMs of this Example are shown in Table 22. The TBMs are schematically shown in FIG. 19.

TABLE 22
Amino Acid Sequences of TBMs of Example 4

| | | |
|---|---|---|
| | | SEQ |
| Component | Sequence | ID NO: |

AB4-1 (FIG. 19A)
(αCD19xCD58(IgV)xαCD3)

| | | |
|---|---|---|
| αCD19 Light Chain | EIVMTQSPATLSLSPGERATLSCRASQDISKYLNWYQQKP | 736 |
| | GQAPRLLIYHTSRLHSGIPARFSGSGSGTDYTLTISSLQPE | |
| | DFAVYFCQQGNTLPYTFGQGTKLEIKRTVAAPSVFIFPPS | |
| | DEQLKSGTASVVCLLNNFYPREAKVQWKVDNALQSGNS | |
| | QESVTEQDSKDSTYSLSSTLTLSKADYEKHKVYACEVTH | |
| | QGLSSPVTKSFNRGEC | |
| αCD19_Fab- | QVQLQESGPGLVKPSETLSLTCTVSGVSLPDYGVSWIRQ | 743 |
| αCD3_scFv-Fc | PPGKGLEWIGVIWGSETTYYQSSLKSRVTISKDNSKNQVS | |
| | LKLSSVTAADTAVYYCAKHYYYGGSYAMDYWGQGTLVTV | |
| | SSASTKGPSVFPLAPSSKSTSGGTAALGCLVKDYFPEPVT | |
| | VSWNSGALTSGVHTFPAVLQSSGLYSLSSVVTVPSSSLG | |
| | TQTYICNVNHKPSNTKVDKRVEPKSCGGGGSGGGGSEV | |
| | QLVESGGGLVQPGGSLKLSCAASGFTFNTYAMNWVRQA | |
| | SGKGLEWVGRIRSKYNNYATYYADSVKDRFTISRDDSKS | |
| | TLYLQMNSLKTEDTAVYYCVRHGNFGNSYVSWFAYWGQ | |
| | GTLVTVSSGGGGSGGGGSGGGGSGGGGSQAVVTQEPS | |
| | LTVSPGGTVTLTCRSSTGAVTTSNYANWVQQKPGQAPR | |
| | GLIGGTNKRAPWTPARFSGSLLGDKAALTLSGAQPEDEA | |
| | EYFCALWYSNLWVFGGGTKLTVLGGGGSDKTHTCPPCP | |
| | APELLGGPSVFLFPPKPKDTLMISRTPEVTCVVVAVSHED | |
| | PEVKFNWYVDGVEVHNAKTKPREEQYASTYRVVSVLTVL | |
| | HQDWLNGKEYKCKVSNKALAAPIEKTISKAKGQPREPQV | |
| | CTLPPSREEMTKNQVSLSCAVKGFYPSDIAVEWESNGQP | |
| | ENNYKTTPPVLDSDGSFFLVSKLTVDKSRWQQGNVFSCS | |
| | VMHEALHNHYTQKSLSLSPGK | |
| CD58 IgV-Fc | SQQIYGVVYGNVTFHVPSNVPLKEVLWKKQKDKVAELEN | 744 |
| | SEFRAFSSFKNRVYLDTVSGSLTIYNLTSSDEDEYEMESP | |
| | NITDTMKFFLYVLESGGGGSDKTHTCPPCPAPELLGGPSV | |
| | FLFPPKPKDTLMISRTPEVTCVVVAVSHEDPEVKFNWWYVD | |
| | GVEVHNAKTKPREEQYASTYRVVSVLTVLHQDWLNGKEY | |
| | KCKVSNKALAAPIEKTISKAKGQPREPQVYTLPPCREEMT | |
| | KNQVSLWCLVKGFYPSDIAVEWESNGQPENNYKTTPPVL | |
| | DSDGSFFLYSKLTVDKSRWQQGNVFSCSVMHEALHNRY | |
| | TQKSLSLSPGK | |

AB4-2 (FIG. 19B)
(αCD3xCD58xαCD19scFv)

| | | |
|---|---|---|
| αCD3_scFv-Fc- | EVQLVESGGGLVQPGGSLKLSCAASGFTFNTYAMNWVR | 753 |
| αCD19_scFv | QASGKGLEWVGRIRSKYNNYATYYADSVKDRFTISRDDS | |
| | KSTLYLQMNSLKTEDTAWYCVRHGNFGNSYVSWFAYW | |
| | GQGTLVTVSSGGGGSGGGGSGGGGSGGGGSCAVVTQ | |
| | EPSLTVSPGGTVTLTCRSSTGAVTTSNYANWVQQKPGQA | |
| | PRGLIGGTNKRAPWTPARFSGSLLGDKAALTLSGAQPED | |
| | EAEYFCALWYSNLWVFGGGTKLTVLGGGGSDKTHTCPP | |
| | CPAPELLGGPSVFLFPPKPKDTLMISRTPEVTCVVVAVSH | |
| | EDPEVKFNWYVDGVEVHNAKTKPREEQYNSTYRVVSVLT | |
| | VLHQDWLNGKEYKCKVSNKALAAPIEKTISKAKGQPREPQ | |
| | VYTLPPCREEMTKNQVSLWQLVKGFYPSDAVEWESNGQ | |
| | PENNYKTTPPVLDSDGSFFLYSKLTVDKSRWQQGNVFSC | |
| | SVMHEALHNHYTQKSLSLSPGKGGGGSGGGGSGGGGS | |
| | GGGGSQVQLQESGPGLVKPSETLSLTCTVSGVSLPDYGV | |
| | SWIRQPPGKGLEWIGVIWGSETTYYQSSLKSRVTISKDNS | |
| | KNQVSLKLSSVTAADTAVYYCAKHYYYGGSYAMDYWGQ | |
| | GTLVTVSSGGGGSGGGGSGGGGSGGGGSEIVIVITQSPA | |
| | TLSLSPGERATLSCRASQDISKYLNWYQQKPGQAPRLLIY | |
| | HTSRLHSGIPARFSGSGSGTDYTLTISSLQPEDFAVYFCQ | |
| | QGNTLPYTFGQGTKLEIK | |
| CD58 IgV-Fc | SQQIYGVVYGNVTFHVPSNVPLKEVLWKKQKDKVAELEN | 754 |
| | SEFRAFSSFKNRVYLDTVSGSLTIYNLTSSDEDEYEMESP | |
| | NITDTMKFFLYVLESGGGSDKTHTCPPCPAPELLGGPSVF | |
| | LFPPKPKDTLMISRTPEVTCVVVAVSHEDPEVKFNWYVD | |
| | GVEVHNAKTKPREEQYGSTYRVVSVLTVLHQDWLNGKE | |
| | YKCKVSNKALAAPIEKTISKAKGQPREPQVCTLPPSRDEL | |
| | TKNQVSLSCAVKGFYPSDIAVEWESNGQPENNYKTTPPV | |
| | LDSDGSFFLVSKLTVDKSRWQQGNVFSCSVMHEALHNR | |
| | YTQKSLSLSPGK | |

AB4-3 (FIG. 19C)
(αCD3xCD58xαCD19Fab)

| | | |
|---|---|---|
| αCD19 Light Chain | EIVMTQSPATLSLSPGERATLSCRASQDISKYLNWYQQKP | 736 |
| | GQAPRLLIYHTSRLHSGIPARFSGSGSGTDYTLTISSLQPE | |
| | DFAVYFCQQGNTLPYTFGQGTKLEIKRTVAAPSVFIFPPS | |
| | DEQLKSGTASVVCLLNNFYPREAKVQWKVDNALQSGNS | |
| | QESVTEQDSKDSTYSLSSTLTLSKADYEKHKVYACEVTH | |
| | QGLSSPVTKSFNRGEC | |
| αCD3_scFv-Fc- | EVQLVESGGGLVQPGGSLKLSCAASGFTFNTYAMNWVR | 755 |
| αCD19_VH-CH1 | QASGKGLEWVGRIRSKYNNYATYYADSVKDRFTISRDDS | |
| | KSTLYLQMNSLKTEDTAVYYCVRHGNFGNSYVSWFAYW | |
| | GQGTLVTVSSGGGGSGGGGSGGGGSGGGGSQAVVTQ | |
| | EPSLTVSPGGTVTLTCRSSTGAVTTSNYANWVQQKPGQA | |
| | PRGLIGGTNKRAPWTPARFSGSLLGDKAALTLSGAQPED | |
| | EAEYFCALWYSNLWVFGGGTKLTVLGGGGSDKTHTCPP | |
| | CPAPELLGGPSVFLFPPKPKDTLMISRTPEVTCVVVAVSH | |
| | EDPEVKFNWYVDGVEVHNAKTKPREEQYNSTYRVVSVLT | |
| | VLHQDWLNGKEYKCKVSNKALAAPIEKTISKAKGQPREPQ | |
| | VYTLPPCREEMTKNQVSLWCLVKGFYPSDIAVEWESNGQ | |
| | PENNYKTTPPVLDSDGSFFLYSKLTVDKSRWQQGNVFSC | |
| | SVMHEALHNHYTQKSLSLSPGKGGGGSGGGGSGGGGS | |
| | GGGGSQVQLQESGPGLVKPSETLSLTCTVSGVSLPDYGV | |
| | SWIRQPPGKGLEWIGVIWGSETTYYQSSLKSRVTISKDNS | |
| | KNQVSLKLSSVTAADTAVYYCAKHYYYGGSYAMDYWGQ | |
| | GTLVTVSSASTKGPSVFPLAPSSKSTSGGTAALGCLVKDY | |
| | FPEPVTVSWNSGALTSGVHTFPAVLQSSGLYSLSSVVTV | |
| | PSSSLGTQTYICNVNHKPSNTKVDKRVEPKSC | |
| CD58 IgV-Fc | SQQIYGVVYGNVTFHVPSNVPLKEVLWKKQKDKVAELEN | 754 |
| | SEFRAFSSFKNRVYLDTVSGSLTIYNLTSSDEDEYEMESP | |
| | NITDTMKFFLYVLESGGGSDKTHTCPPCPAPELLGGPSVF | |
| | LFPPKPKDTLMISRTPEVTCVVVAVSHEDPEVKFNWYVD | |
| | GVEVHNAKTKPREEQYGSTYRVVSVLTVLHQDWLNGKE | |
| | YKCKVSNKALAAPIEKTISKAKGQPREPQVCTLPPSRDEL | |
| | TKNQVSLSCAVKGFYPSDIAVEWESNGQPENNYKTTPPV | |
| | LDSDGSFFLVSKLTVDKSRWQQGNVFSCSVMHEALHNR | |
| | YTQKSLSLSPGK | |

[0635] Re-directed T cell cytotoxicity assays were performed on the TBMs as described in Example 1, using human CD-19 expressing Nalm6 target cells at an E:T ratio of 5:1 and an incubation time of 48 hours.

[0636] A NFAT activation assay to assess non-specific NFAT activation of the constructs was performed as described in Example 2.

[0637] A cytokine release assay as performed in Example 1 was performed using TBMs AB4-1, AB4-2, AB3-3, an anti-CD3-anti-CD19 bispecific construct, and an anti-gH-anti-CD3-CD58 trispecific construct.

[0638] 7.4.2. Results

[0639] The results of the re-directed T cell cytotoxicity assay are shown in FIG. 20. TBMs with the CD19 binding arm on the C-terminus (AB4-2 and AB4-3) were observed to have less cytotoxic activity compared to the N-terminus format (AB4-1).

[0640] The results of the NFAT activation assay are shown in FIG. 21. Constructs with the CD19 binding arm on the C-terminus (AB4-2 and AB4-3) induced a higher induction of NFAT compared to the the N-terminus format (AB4-1).

[0641] The results of the cytokine release assay are shown in FIG. 22. The AB4-1 construct format induced the highest cytokine levels. The other trispecific scaffolds tested stimulated cytokine levels that were relatively comparable to the bispecific format.

### 7.5. Example 5: Anti-CD19-Anti-CD3-Anti-CD2 TBMs with Different CD3 Binding Arms

[0642] 7.5.1. Materials and Methods

[0643] Trispecific binding molecules with different anti-CD3 binding arms, namely scFvs corresponding to anti-CD3 antibodies BMA031 and OKT3, were generated and analyzed for their potential to induce T cell-mediated apoptosis in tumor target cells. The TBMs were compared to bispecific constructs targeting CD3 and CD19. Amino acid sequences of the bispecific and trispecific constructs used in this example are shown in Table 23. The bispecific and trispecfic constructs used in this Example are schematically shown in FIG. 23.

TABLE 23A
Amino Acid Sequences of BMA031 Constructs of Example 5

| | | |
|---|---|---|
| | | SEQ |
| Component | Sequence | ID NO: |

Bispecific (FIG. 23A)
αCD19-αCD3 (BMA031)

| | | |
|---|---|---|
| αCD19 Light Chain | EIVMTQSPATLSLSPGERATLSCRASQDISKYLNWYQQKP | 736 |
| | GQAPRLLIYHTSRLHSGIPARFSGSGSGTDYTLTISSLQPE | |
| | DFAVYFCQQGNTLPYTFGQGTKLEIKRTVAAPSVFIFPPS | |
| | DEQLKSGTASVVCLLNNFYPREAKVQWKVDNALQSGNS | |
| | QESVTEQDSKDSTYSLSSTLTLSKADYEKHKVYACEVTH | |
| | QGLSSPVTKSFNRGEC | |
| αCD19 Heavy Chain | QVQLQESGPGLVKPSETLSLTCTVSGVSLPDYGVSWIRQ | 756 |
| | PPGKGLEWIGVIWGSETTYYQSSLKSRVTISKDNSKNQVS | |
| | LKLSSVTAADTAVYYCAKHYYYGGSYAMDYWGQGTLVTV | |
| | SSASTKGPSVFPLAPSSKSTSGGTAALGCLVKDYFPEPVT | |
| | VSWNSGALTSGVHTFPAVLQSSGLYSLSSVVTVPSSSLG | |
| | TQTYICNVNHKPSNTKVDKRVEPKSCDKTHTCPPCPAPEL | |
| | LGGPSVFLFPPKPKDTLMISRTPEVTCVVVAVSHEDPEVK | |
| | FNWYVDGVEVHNAKTKPREEQYASTYRVVSVLTVLHQD | |
| | WLNGKEYKCKVSNKALAAPIEKTISKAKGQPREPQVCTLP | |
| | PSREEMTKNQVSLSCAVKGFYPSDIAVEWESNGQPENNY | |
| | KTTPPVLDSDGSFFLVSKLTVDKSRWQQGNVFSCSVMHE | |
| | ALHNHYTQKSLSLSPGK | |
| BMA031 scFv-Fc | | |
| HCDR1 (Combined) | GYKFTSYVMH | 757 |
| HCDR2 (Combined) | YINPYNDVTKYNEKFKG | 758 |
| HCDR3 (Combined) | GSYYDYDGFVY | 243 |
| HCDR1 (Kabat) | SYVMH | 759 |
| HCDR2 (Kabat) | YINPYNDVTKYNEKFKG | 758 |
| HCDR3 (Kabat) | GSYYDYDGFVY | 243 |
| HCDR1 (Chothia) | GYKFTSY | 760 |
| HCDR2 (Chothia) | NPYNDV | 761 |
| HCDR3 (Chothia) | GSYYDYDGFVY | 243 |
| HCDR1 (IMGT) | GYKFTSYV | 762 |
| HCDR2 (IMGT) | INPYNDVT | 763 |
| HCDR3 (IMGT) | ARGSYYDYDGFVY | 764 |
| VH | EVQLQQSGPELVKPGASVKMSCKASGYKFTSYVMHWVK | 245 |
| | QKPGQGLEWIGYINPYNDVTKYNEKFKGKATLTSDKSSST | |
| | AYMELSSLTSEDSAVHYCARGSYYDYDGFVYWGQGTLV | |
| | TVSA | |
| LCDR1 (Combined) | SATSSVSYMH | 244 |
| LCDR2 (Combined) | DTSKLAS | 150 |
| LCDR3 (Combined) | QQWSSNPLT | 179 |
| LCDR1 (Kabat) | SATSSVSYMH | 244 |
| LCDR2 (Kabat) | DTSKLAS | 150 |
| LCDR3 (Kabat) | QQWSSNPLT | 179 |
| LCDR1 (Chothia) | TSSVSY | 765 |
| LCDR2 (Chothia) | DTS | 211 |
| LCDR3 (Chothia) | WSSNPL | 225 |
| LCDR1 (IMGT) | SSVSY | 766 |
| LCDR2 (IMGT) | DTS | 211 |
| LCDR3 (IMGT) | QQWSSNPLT | 179 |
| VL | QIVLTQSPAIMSASPGEKVTMTCSATSSVSYMHWYQQKS | 246 |
| | GTSPKRWIYDTSKLASGVPARFSGSGSGTSYSLTISSMEA | |
| | EDAATYYCQQWSSNPLTFGAGTKLELK | |
| BMA031 scFv-Fc full | EVQLQQSGPELVKPGASVKMSCKASGYKFTSYVMHWVK | 767 |
| sequence | QKPGQGLEWIGYINPYNDVTKYNEKFKGKATLTSDKSSST | |
| | AYMELSSLTSEDSAVHYCARGSYYDYDGFVYWGQGTLV | |
| | TVSAGGGGSGGGGSGGGGSGGGGSQIVLTQSPAIMSAS | |
| | PGEKVTMTCSATSSVSYMHWYQQKSGTSPKRWIYDTSK | |
| | LASGVPARFSGSGSGTSYSLTISSMEAEDAATYYCQQWS | |
| | SNPLTFGAGTKLELKGGGSDKTHTCPPCPAPELLGGPSV | |
| | FLFPPKPKDTLMISRTPEVTCVVVDVSHEDPEVKFNWYVD | |
| | GVEVHNAKTKPREEQYASTYRVVSVLTVLHQDWLNGKEY | |
| | KCKVSNKALPAPIEKTISKAKGQPREPQVYTLPPCREEMT | |
| | KNQVSLWCLVKGFYPSDIAVEWESNGQPENNYKTTPPVL | |
| | DSDGSFFLYSKLTVDKSRWQQGNVFSCSVMHEALHNHY | |
| | TQKSLSLSPGK | |

Trispecific (FIG. 23B)
αCD19-αCD3(BMA031)-CD58IgV

| | | |
|---|---|---|
| αCD19Light Chain | EIVMTQSPATLSLSPGERATLSCRASQDISKYLNWYQQKP | 736 |
| | GQAPRLLIYHTSRLHSGIPARFSGSGSGTDYTLTISSLQPE | |
| | DFAVYFCQQGNTLPYTFGQGTKLEIKRTVAAPSVFIFPPS | |
| | DEQLKSGTASVVCLLNNFYPREAKVQWKVDNALQSGNS | |
| | QESVTEQDSKDSTYSLSSTLTLSKADYEKHKVYACEVTH | |
| | QGLSSPVTKSFNRGEC | |
| αCD19_Fab- | QVQLQESGPGLVKPSETLSLTCTVSGVSLPDYGVSWIRQ | 768 |
| BMA031_scFv-Fc | PPGKGLEWIGVIWGSETTYYQSSLKSRVTISKDNSKNQVS | |
| | LKLSSVTAADTAVYYCAKHYYYGGSYAMDYWGQGTLVTV | |
| | SSASTKGPSVFPLAPSSKSTSGGTAALGCLVKDYFPEPVT | |
| | VSWNSGALTSGVHTFPAVLQSSGLYSLSSVVTVPSSSLG | |
| | TQTYICNVNHKPSNTKVDKRVEPKSCGGGGSGGGGSEV | |
| | QLQQSGPELVKPGASVKMSCKASGYKFTSYVMHWVKQK | |
| | PGQGLEWIGYINPYNDVTKYNEKFKGKATLTSDKSSSTAY | |
| | MELSSLTSEDSAVHYCARGSYYDYDGFVYWGQGTLVTV | |
| | SAGGGGSGGGGSGGGGSGGGGSQIVLTQSPAIMSASPG | |
| | EKVTMTCSATSSVSYMHWYQQKSGTSPKRWIYDTSKLAS | |
| | GVPARFSGSGSGTSYSLTISSMEAEDAATYYCQQWSSNP | |
| | LTFGAGTKLELKGGGGSDKTHTCPPCPAPELLGGPSVFL | |
| | FPPKPKDTLMISRTPEVTCVVVAVSHEDPEVKFNWYVDG | |
| | VEVHNAKTKPREEQYGSTYRVVSVLTVLHQDWLNGKEYK | |
| | CKVSNKALAAPIEKTISKAKGQPREPQVCTLPPSRDELTK | |
| | NQVSLSCAVKGFYPSDIAVEWESNGQPENNYKTTPPVLD | |
| | SDGSFFLVSKLTVDKSRWQQGNVFSCSVMHEALHNHYT | |
| | QKSLSLSPGK | |
| CD58 IgV-Fc | SQQIYGVVYGNVTFHVPSNVPLKEVLWKKQKDKVAELEN | 744 |
| | SEFRAFSSFKNRVYLDTVSGSLTIYNLTSSDEDEYEMESP | |
| | NITDTMKFFLYVLESGGGGSDKTHTCPPCPAPELLGGPSV | |
| | FLFPPKPKDTLMISRTPEVTCVVVAVSHEDPEVKFNWYVD | |
| | GVEVHNAKTKPREEQYASTYRVVSVLTVLHQDWLNGKEY | |
| | KCKVSNKALAAPIEKTISKAKGQPREPQVYTLPPCREEMT | |
| | KNQVSLWCLVKGFYPSDIAVEWESNGQPENNYKTTPPVL | |
| | DSDGSFFLYSKLTVDKSRWQQGNVFSCSVMHEALHNRY | |
| | TQKSLSLSPGK | |

TABLE 23B
Amino Acid Sequences of OKT3 Constructs of Example 5

| | | |
|---|---|---|
| | | SEQ |
| Component | Sequence | ID NO: |

Bispecific (FIG. 23A)
αCD19-αCD3(OKT3)

| | | |
|---|---|---|
| αCD19Light Chain | EIVMTQSPATLSLSPGERATLSCRASQDISKYLNWYQQKP | 736 |
| | GQAPRLLIYHTSRLHSGIPARFSGSGSGTDYTLTISSLQPE | |
| | DFAVYFCQQGNTLPYTFGQGTKLEIKRTVAAPSVFIFPPS | |
| | DEQLKSGTASVVCLLNNFYPREAKVQWKVDNALQSGNS | |
| | QESVTEQDSKDSTYSLSSTLTLSKADYEKHKVYACEVTH | |
| | QGLSSPVTKSFNRGEC | |
| αCD19 Heavy Chain | QVQLQESGPGLVKPSETLSLTCTVSGVSLPDYGVSWIRQ | 756 |
| | PPGKGLEWIGVIWGSETTYYQSSLKSRVTISKDNSKNQVS | |
| | LKLSSVTAADTAVYYCAKHYYYGGSYAMDYWGQGTLVTV | |
| | SSASTKGPSVFPLAPSSKSTSGGTAALGCLVKDYFPEPVT | |
| | VSWNSGALTSGVHTFPAVLQSSGLYSLSSVVTVPSSSLG | |
| | TQTYICNVNHKPSNTKVDKRVEPKSCDKTHTCPPCPAPEL | |
| | LGGPSVFLFPPKPKDTLMISRTPEVTCVVVAVSHEDPEVK | |
| | FNWYVDGVEVHNAKTKPREEQYASTYRVVSVLTVLHQD | |
| | WLNGKEYKCKVSNKALAAPIEKTISKAKGQPREPQVCTLP | |
| | PSREEMTKNQVSLSCAVKGFYPSDIAVEWESNGQPENNY | |
| | KTTPPVLDSDGSFFLVSKLTVDKSRWQQGNVFSCSVMHE | |
| | ALHNHYTQKSLSLSPGK | |
| OKT3 scFv-Fc | | |
| HCDR 1 (Combined) | GYTFTRYTMH | 231 |
| HCDR2 (Combined) | YINPSRGYTNYNQKVKD | 156 |
| HCDR3 (Combined) | YYDDHYSLDY | 188 |
| HCDR1 (Kabat) | RYTMH | 129 |
| HCDR2 (Kabat) | YINPSRGYTNYNQKVKD | 156 |
| HCDR3 (Kabat) | YYDDHYSLDY | 188 |
| HCDR1 (Chothia) | GYTFTRY | 197 |
| HCDR2 (Chothia) | NPSRGY | 210 |
| HCDR3 (Chothia) | YYDDHYSLDY | 188 |
| HCDR1 (IMGT) | GYTFTRYT | 769 |
| HCDR2 (IMGT) | INPSRGYT | 770 |
| HCDR3 (IMGT) | ARYYDDHYSLDY | 771 |
| VH | QVQLVQSGGGVVQPGRSLRLSCKASGYTFTRYTMHWVR | 111 |
| | QAPGKGLEWIGYINPSRGYTNYNQKVKDRFTISRDNSKNT | |
| | AFLQMDSLRPEDTGVYFCARYYDDHYSLDYWGQGTPVT | |
| | VSS | |
| LCDR1 (Combined) | SASSSVSYMN | 130 |
| LCDR2 (Combined) | DTSKLAS | 150 |
| LCDR3 (Combined) | QQWSSNPFT | 174 |
| LCDR1 (Kabat) | SASSSVSYMN | 130 |
| LCDR2 (Kabat) | DTSKLAS | 150 |
| LCDR3 (Kabat) | QQWSSNPFT | 174 |
| LCDR1 (Chothia) | SSSVSY | 198 |
| LCDR2 (Chothia) | DTS | 211 |
| LCDR3 (Chothia) | WSSNPF | 222 |
| LCDR1 (IMGT) | SSVSY | 766 |
| LCDR2 (IMGT) | DTS | 211 |
| LCDR3 (IMGT) | QQWSSNPFT | 174 |
| VL | DIQMTQSPSSLSASVGDRVTITCSASSSVSYMNWYQQTP | 87 |
| | GKAPKRWIYDTSKLASGVPSRFSGSGSGTDYTFTISSLQP | |
| | EDIATYYCQQWSSNPFTFGQGTKLQIT | |
| OKT3 scFv-Fc full | QVQLVQSGGGVVQPGRSLRLSCKASGYTFTRYTMHWVR | 772 |
| sequence | QAPGKGLEWIGYINPSRGYTNYNQKVKDRFTISRDNSKNT | |
| | AFLQMDSLRPEDTGVYFCARYYDDHYSLDYWGQGTPVT | |
| | VSSGGGGSGGGKSKKGGSGGGGSDIQMTQSPSSLSASV | |
| | GDRVTITCSASSSVSYMNWYQQTPGKAPKRWIYDTSKLA | |
| | SGVPSRFSGSGSGTDYTFTISSLQPEDIATYYCQQWSSN | |
| | PFTFGQGTKLQITGGGGSDKTHTCPPCPAPELLGGPSVF | |
| | LFPPKPKDTLMISRTPEVTCVVVAVSHEDPEVKFNWYVD | |
| | GVEVHNAKTKPREEQYASTYRVVSVLTVLHQDWLNGKEY | |
| | KCKVSNKALAAPIEKTISKAKGQPREPQVYTLPPCREEMT | |
| | KNQVSLWCLVKGFYPSDIAVEWESNGQPENNYKTTPPVL | |
| | DSDGSFFLYSKLTVDKSRWQQGNVFSCSVMHEALHNHY | |
| | TQKSLSLSPGK | |

Trispecific (FIG. 23B)
αCD19-αCD3(OKT3)-CD58IgV

| | | |
|---|---|---|
| αCD19Light Chain | EIVMTQSPATLSLSPGERATLSCRASQDISKYLNWYQQKP | 736 |
| | GQAPRLLIYHTSRLHSGIPARFSGSGSGTDYTLTISSLQPE | |
| | DFAVYFCQQGNTLPYTFGQGTKLEIKRTVAAPSVFIFPPS | |
| | DEQLKSGTASVVCLLNNFYPREAKVQWKVDNALQSGNS | |
| | QESVTEQDSKDSTYSLSSTLTLSKADYEKHKVYACEVTH | |
| | QGLSSPVTKSFNRGEC | |
| αCD19_Fab- | QVQLQESGPGLVKPSETLSLTCTVSGVSLPDYGVSWIRQ | 773 |
| OKT3_scFv-Fc | PPGKGLEWIGVIWGSETTYYQSSLKSRVTISKDNSKNQVS | |
| | LKLSSVTAADTAVYYCAKHYYYGGSYAMDYWGQGTLVTV | |
| | SSASTKGPSVFPLAPSSKSTSGGTAALGCLVKDYFPEPVT | |
| | VSWNSGALTSGVHTFPAVLQSSGLYSLSSVVTVPSSSLG | |
| | TQTYICNVNHKPSNTKVDKRVEPKSCGGGGSGGGGSQV | |
| | QLVQSGGGVVQPGRSLRLSCKASGYTFTRYTMHWVRQA | |
| | PGKGLEWIGYINPSRGYTNYNQKVKDRFTISRDNSKNTAF | |
| | LQMDSLRPEDTGVYFCARYYDDHYSLDYWGQGTPVTVS | |
| | SGGGGSGGGGSGGGGSGGGGSDIQMTQSPSSLSASVG | |
| | DRVTITCSASSSVSYMNWYQQTPGKAPKRWIYDTSKLAS | |
| | GVPSRFSGSGSGTDYTFTISSLQPEDIATYYCQQWSSNP | |
| | FTFGQGTKLQITGGGGSDKTHTCPPCPAPELLGGPSVFLF | |
| | PPKPKDTLMISRTPEVTCVVVAVSHEDPEVKFNWYVDGV | |
| | EVHNAKTKPREEQYG | |
| | STYRVVSVLTVLHQDWLNGKEYKCKVSNKALAAPIEKTIS | |
| | KAKGQPREPQVCTLPPSRDELTKNQVSLSCAVKGFYPSD | |
| | IAVEWESNGQPENNYKTTPPVLDSDGSFFLVSKLTVDKSR | |
| | WQQGNVFSCSVMHEALHNHYTQKSLSLSPGK | |
| CD58 IgV-Fc | SQQIYGVVYGNVTFHVPSNVPLKEVLWKKQKDKVAELEN | 744 |
| | SEFRAFSSFKNRVYLDTVSGSLTIYNLTSSDEDEYEMESP | |
| | NITDTMKFFLYVLESGGGGSDKTHTCPPCPAPELLGGPSV | |
| | FLFPPKPKDTLMISRTPEVTCVVVAVSHEDPEVKFNEWYVD | |
| | GVEVHNAKTKPREEQYASTYRVVSVLTVLHQDWLNGKEY | |
| | KCKVSNKALAAPIEKTISKAKGQPREPQVYTLPPCREEMT | |
| | KNQVSLWCLVKGFYPSDIAVEWESNGQPENNYKTTPPVL | |
| | DSDGSFFLYSKLTVDKSRWQQGNVFSCSVMHEALHNRY | |
| | TQKSLSLSPGK | |

[0644] Re-directed T cell cytotoxicity assays were performed using the constructs as described in Example 1, using human CD-19 expressing Nalm6 target cells at an E:T ratio of 5:1 and an incubation time of 48 hours.

[0645] Cytokine release assays were also performed as in Example 1.

[0646] 7.5.2. Results

[0647] The results of the re-directed T cell cytotoxicity assay are shown in FIG. 24A and FIG. 24B. The two trispecfic constructs exhibited superior cytotoxicity in target cells compared to the bispecific constructs.

[0648] Results of the cytokine release assay are shown in FIG. 25. The trispecific constructs were observed to elicit a stronger cytokine response when compared to their bispecific counterpart.

### 7.6. Example 6: Production and Characterization of an Anti-Her2-Anti-CD3-Anti-CD2 TBM

[0649] 7.6.1. Materials and Methods

[0650] A trispecific binding molecules targeting Her2, CD3 and CD2 was generated and analyzed for its potential to induce T cell-mediated apoptosis in tumor target cells. The TBM was compared to a bispecific construct targeting CD3 and Her2. Amino acid sequences of the bispecific and trispecific constructs used in this Example are shown in Table 24. The bispecific and trispecfic constructs used in this Example are schematically shown in FIG. 26.

TABLE 24
Amino Acid Sequences of Constucts of Example 6

| | | |
|---|---|---|
| | | SEQ |
| Component | Sequence | ID NO: |

Bispecific (FIG. 26A)
αHer2xαCD3

| | | |
|---|---|---|
| αHer2 Fab | | |
| HCDR1 (Combined) | GFNIKDTYIH | 774 |
| HCDR2 (Combined) | RIYPTNGYTRYADSVKG | 775 |
| HCDR3 (Combined) | WGGDGFYAMDY | 776 |
| HCDR1 (Kabat) | DTYIH | 777 |
| HCDR2 (Kabat) | RIYPTNGYTRYADSVKG | 775 |
| HCDR3 (Kabat) | WGGDGFYAMDY | 776 |
| HCDR1 (Chothia) | GFNIKDT | 778 |
| HCDR2 (Chothia) | YPTNGY | 779 |
| HCDR3 (Chothia) | WGGDGFYAMDY | 776 |
| HCDR1 (IMGT) | GFNIKDTY | 780 |
| HCDR2 (IMGT) | IYPTNGYT | 781 |
| HCDR3 (IMGT) | SRWGGDGFYAMDY | 782 |
| VH | EVQLVESGGGLVQPGGSLRLSCAASGFNIKDTYIHWVRQ | 783 |
| | APGKGLEWVARIYPTNGYTRYADSVKGRFTISADTSKNTA | |
| | YLQMNSLRAEDTAVYYCSRWGGDGFYAMDYWGQGTLV | |
| | TVSS | |
| LCDR1 (Combined) | RASQDVNTAVA | 784 |
| LCDR2 (Combined) | SASFLYS | 785 |
| LCDR3 (Combined) | QQHYTTPPT | 786 |
| LCDR1 (Kabat) | RASQDVNTAVA | 784 |
| LCDR2 (Kabat) | SASFLYS | 785 |
| LCDR3 (Kabat) | QQHYTTPPT | 786 |
| LCDR1 (Chothia) | SQDVNTA | 504 |
| LCDR2 (Chothia) | SAS | 518 |
| LCDR3 (Chothia) | HYTTPP | 787 |
| LCDR1 (IMGT) | QDVNTA | 788 |
| LCDR2 (IMGT) | SAS | 518 |
| LCDR3 (IMGT) | QQHYTTPPT | 786 |
| VL | DIQMTQSPSSLSASVGDRVTITCRASQDVNTAVAWYQQK | 789 |
| | PGKAPKLLIYSASFLYSGVPSRFSGSRSGTDFTLTISSLQP | |
| | EDFATYYCQQHYTTPPTFGQGTKVEIK | |
| αHer2 Light Chain | DIQMTGSPSSLSASVGDRVITICRASQDVNTAVAWYQQK | 790 |
| | PGKAPKWYSASFLYSGVPSRFSGSRSGTDFTLTISSLQP | |
| | EDFATYYCQQHYTTPPTFGQGTKVEIKRTVAAPSVFIFPP | |
| | SDEQLKSGTASVVCLLNNFYPREAKVQWKVDNALQSGN | |
| | SQESVTEQDSKDSTYSLSSTLTLSKADYEKHKVYACEVTH | |
| | QGLSSPVTKSFNRGEC | |
| αHer2 Heavy Chain | EVQLVESGGGLVQPGGSLRLSCAASGFNIKDTYIHWVRQ | 791 |
| | APGKGLEWVARIYPTNGYTRYADSVKGRFTISADTSKNTA | |
| | YLQMNSLRAEDTAVYYCSRWGGDGFYAMDYWGQGTLV | |
| | TVSSASTKGPSVFPLAPSSKSTSGGTAALGCLVKDYFPEP | |
| | VTVSWNSGALTSGVHTFPAVLQSSGLYSLSSVVTVPSSSL | |
| | GTQTYICNVNHKPSNTKVDKRVEPKSCDKTHTCPPCPAP | |
| | ELLGGPSVFLFPPKPKDTLMISRTPEVTCVVVAVSHEDPE | |
| | VKFNWYVDGVEVHNAKTKPREEQYASTYRVVSVLTVLHQ | |
| | DWLNGKEYKCKVSNKALAAPIEKTISKAKGQPREPQVCTL | |
| | PPSREEMTKNQVSLSCAVKGFYPSDIAVEWESNGQPENN | |
| | YKTTPPVLDSDGSFFLVSKLTVDKSRWQQGNVFSCSVMH | |
| | EALHNHYTQKSLSLSPGK | |
| αCD3 scFv-Fc | EVQLVESGGGLVQPGGSLKLSCAASGFTFNTYAMNWVR | 792 |
| | QASGKGLEWVGRIRSKYNNYATYYADSVKDRFTISRDDS | |
| | KSTLYLQMNSLKTEDTAVYYCVRHGNFGNSYVSWFAYW | |
| | GQGTLVTVSSGGGGSGGGGSGGGGSGGGGSQAVVTQ | |
| | EPSLTVSPGGTVTLTCRSSTGAVTTSNYANWVQQKPGQA | |
| | PRGLIGGTNKRAPWTPARFSGSLLGDKAALTLSGAQPED | |
| | EAEYFCALWYSNLWVFGGGTKLTVLGGGGSDKTHTCPP | |
| | CPAPELLGGPSVFLFPPKPKDTLMISRTPEVTCVVVAVSH | |
| | EDPEVKFNWYVDGVEVHNAKTKPREEQYASTYRVVSVLT | |
| | VLHQDWLNGKEYKCKVSNKALAAPIEKTISKAKGQPREPQ | |
| | VYTLPPCREEMTKNQVSLWCLVKGFYPSDIAVEWESNGQ | |
| | PENNYKTTPPVLDSDGSFFLYSKLTVDKSRWQQGNVFSC | |
| | SVMHEALHNRYTQKSLSLSPGK | |

Trispecific (FIG. 26B)
αHer2xαCD3xCD58IgV

| | | |
|---|---|---|
| αHer2 Light Chain | DIQMTQSPSSLSASVGDRVTITCRASQDVNTAVAWYQQK | 790 |
| | PGKAPKLLIYSASFLYSGVPSRFSGSRSGTDFTLTISSLQP | |
| | EDFATYYCQQHYTTPPTFGQGTKVEIKRTVAAPSVFIFPP | |
| | SDEQLKSGTASVVCLLNNFYPREAKVQWKVDNALQSGN | |
| | SQESVTEQDSKDSTYSLSSTLTLSKADYEKHKVYACEVTH | |
| | QGLSSPVTKSFNRGEC | |
| αHer2_Fab- | EVQLVESGGGLVQPGGSLRLSCAASGFNIKDTYIHWVRQ | 793 |
| αCD3_scFv-Fc | APGKGLEWVARIYPTNGYTRYADSVKGRFTISADTSKNTA | |
| | YLQMNSLRAEDTAVYYCSRWGGDGFYAMDYWGQGTLV | |
| | TVSSASTKGPSVFPLAPSSKSTSGGTAALGCLVKDYFPEP | |
| | VTVSWNSGALTSGVHTFPAVLQSSGLYSLSSVVTVPSSSL | |
| | GTQTYICNVNHKPSNTKVDKRVEPKSCGGGGSGGGGSE | |
| | VQLVESGGGLVQPGGSLKLSCAASGFTFNTYAMNWVRQ | |
| | ASGKGLEWVGRIRSKYNNYATYYADSVKDRFTISRDDSK | |
| | STLYLQMNSLKTEDTAVYYCVRHGNFGNSYVSWFAYWG | |
| | QGTLVTVSSGGGGSGGGGSGGGGSGGGGSQAVVTQEP | |
| | SLTVSPGGTVTLTCRSSTGAVTTSNYANWVQQKPGQAP | |
| | RGLIGGTNKRAPWTPARFSGSLLGDKAALTLSGAQPEDE | |
| | AEYFCALWYSNLWVFGGGTKLTVLGGGGSDKTHTCPPC | |
| | PAPELLGGPSVFLFPPKPKDTLMISRTPEVTCVVVAVSHE | |
| | DPEVKFNWYVDGVEVHNAKTKPREEQYASTYRVVSVLTV | |
| | LHQDWLNGKEYKCKVSNKALAAPIEKTISKAKGQPREPQV | |
| | CTLPPSREEMTKNQVSLSCAVKGFYPSDIAVEWESNGQP | |
| | ENNYKTTPPVLDSDGSFFLVSKLTVDKSRWQQGNVFSCS | |
| | VMHEALHNHYTQKSLSLSPGK | |
| CD58 IgV-Fc | SQQIYGVVYGNVTFHVPSNVPLKEVLWKKQKDKVAELEN | 744 |
| | SEFRAFSSFKNRVYIDTVSGSLTIYNLTSSDEDEYEMESP | |
| | NITDTMKFFLYVLESGGGGSDKTHTCPPCPAPELLGGPSV | |
| | FLFPPKPKDTLMISRTPEVTCVVVAVSHEDPEVKFNWYVD | |
| | GVEVHNAKTKPREEQYASTYRVVSVLTVLHQDWLNGKEY | |
| | KCKVSNKALAAPIEKTISKAKGQPREPQVYTLPPCREEMT | |
| | KNQVSLWCLVKGFYPSDIAVEWESNGQPENNYKTTPPVL | |
| | DSDGSFFLYSKLTVDKSRWQQGNVFSCSVMHEALHNRY | |
| | TQKSLSLSPGK | |

[0651] Re-directed T cell cytotoxicity assays were performed using the constructs as described in Example 1, using human huHer2-expressing HCC1954 target cells (cultured in RPMI medium with 10% FBS) and human pan T effector cells at an E:T ratio of 5:1 and an incubation of 48 hours.

[0652] Cytokine release assays were also performed. Secreted cytokines were measured in the supernatant of trispecific or bispecific treated effector and target cell co-cultures using huHer2-expressing HCC1954 target cells (cultured in RPMI medium with 10% FBS) and human pan T effector cells at an E:T ratio of 5:1 and an incubation of 24 hr.

[0653] 7.6.2. Results

[0654] The results of the re-directed T cell cytotoxicity assay are shown in FIG. 27. The TBM showed equivalent to superior cytotoxic activity compared to the bispecific construct.

[0655] Results of the cytokine release assay are shown in FIG. 28. The trispecific construct targeting human CD3, human CD2 and human Her2 produced cytokine levels that were at least comparable to the bispecific molecule targeting human CD3 and human Her2.

### 7.7. Example 7: Production and Characterization of an Anti-Mesothelin-Anti-CD3-Anti-CD2 TBM

[0656] 7.7.1. Materials and Methods

[0657] A trispecific binding molecules targeting mesothelin, CD3 and CD2 was generated and analyzed for its potential to induce T cell-mediated apoptosis in tumor target cells. The TBM was compared to a bispecific construct targeting CD3 and mesothelin. Amino acid sequences of the bispecific and trispecific constructs used in this Example are shown in Table 25. The bispecific and trispecfic constructs used in this Example are schematically shown in FIG. 29.

TABLE 25
Amino Acid Sequences of Constucts of Example 7

| | | |
|---|---|---|
| | | SEQ |
| Component | Sequence | ID NO: |

Bispecific (FIG. 29A)
αMesoxαCD3

| | | |
|---|---|---|
| αMesothelin Fab | | |
| HCDR1 (Combined) | GYTFTDYYMH | 794 |
| HCDR2 (Combined) | WINPNSGGTNYAQKFQG | 795 |
| HCDR3 (Combined) | GWDFDY | 796 |
| HCDR1 (Kabat) | DYYMH | 797 |
| HCDR2 (Kabat) | WINPNSGGTNYAQKFQG | 795 |
| HCDR3 (Kabat) | GWDFDY | 796 |
| HCDR1 (Chothia) | GYTFTDY | 644 |
| HCDR2 (Chothia) | NPNSGG | 798 |
| HCDR3 (Chothia) | GWDFDY | 796 |
| HCDR1 (IMGT) | GYTFTDYY | 799 |
| HCDR2 (IMGT) | INPNSGGT | 800 |
| HCDR3 (IMGT) | ASGWDFDY | 801 |
| VH | QVQLVQSGAEVEKPGASVKVSCKASGYTFTDYYMHWVR | 802 |
| | QAPGQGLEWMGWINPNSGGTNYAQKFQGRVTMTRDTSI | |
| | STAYMELSRLRSDDTAVYYCASGWDFDYWGQGTLVTVS | |
| | S | |
| LCDR1 (Combined) | RASQSIRYYLS | 803 |
| LCDR2 (Combined) | TASILQN | 804 |
| LCDR3 (Combined) | LQTYTTPD | 805 |
| LCDR1 (Kabat) | RASQSIRYYLS | 803 |
| LCDR2 (Kabat) | TASILQN | 804 |
| LCDR3 (Kabat) | LQTYTTPD | 805 |
| LCDR1 (Chothia) | SQSIRYY | 806 |
| LCDR2 (Chothia) | TAS | 807 |
| LCDR3 (Chothia) | TYTTP | 808 |
| LCDR1 (IMGT) | QSIRYY | 809 |
| LCDR2 (IMGT) | TASILQNGVP | 810 |
| LCDR3 (IMGT) | LQTYTTPD | 805 |
| VL | DIVMTQSPSSLSASVGDRVTITCRASQSIRYYLSWYQQKP | 811 |
| | GKAPKLLIYTASILQNGVPSRFSGSGSGTDFTLTISSLQPE | |
| | DFATYYCLQTYTTPDFGPGTKVEIK | |
| αMesothelin Light | DIVMTQSPSSLSASVGDRVTITCRASQSIRYYLSWYQQKP | 812 |
| Chain | GKAPKLLIYTASILQNGVPSRFSGSGSGTDFTLTISSLQPE | |
| | DFATYYCLQTYTTPDFGPGTKVEIKRTVAAPSVFIFPPSDE | |
| | QLKSGTASVVCLLNNFYPREAKVQWKVDNALQSGNSQE | |
| | SVTEQDSKDSTYSLSSTLTLSKADYEKHKVYACEVTHQGL | |
| | SSPVTKSFNRGEC | |
| αMesothelin Heavy | QVQLVQSGAEVEKPGASVKVSCKASGYTFTDYYMHWVR | 813 |
| Chain | QAPGQGLEWMGWINPNSGGTNYAQKFQGRVTMTRDTSI | |
| | STAYMELSRLRSDDTAVYYCASGWDFDYWGQGTLVTVS | |
| | SASTKGPSVFPLAPSSKSTSGGTAALGCLVKDYFPEPVTV | |
| | SWNSGALTSGVHTFPAVLQSSGLYSLSSVVTVPSSSLGT | |
| | QTYICNVNHKPSNTKVDKRVEPKSCDKTHTCPPCPAPELL | |
| | GGPSVFLFPPKPKDTLMISRTPEVTCVVVAVSHEDPEVKF | |
| | NWYVDGVEVHNAKTKPREEQYASTYRVVSVLTVLHQDW | |
| | LNGKEYKCKVSNKALAAPIEKTISKAKGQPREPQVCTLPP | |
| | SREEMTKNQVSLSCAVKGFYPSDIAVEWESNGQPENNYK | |
| | TTPPVLDSDGSFFLVSKLTVDKSRWQQGNVFSCSVMHEA | |
| | LHNHYTQKSLSLSPGK | |
| αCD3 scFv-Fc | EVQLVESGGGLVQPGGSLKLSCAASGFTFNTYAMNWVR | 792 |
| | QASGKGLEWVGRIRSKYNNYATYYADSVKDRFTISRDDS | |
| | KSTLYLQMNSLKTEDTAVYYCVRHGNFGNSYVSWFAYW | |
| | GQGTLVTVSSGGGGSGGGGSGGGGSGGGGSQAVVTQ | |
| | EPSLTVSPGGTVTLTCRSSTGAVTTSNYANWVQQKPGQA | |
| | PRGLIGGTNKRAPWTPARFSGSLLGDKAALTLSGAQPED | |
| | EAEYFCALWYSNLWVFGGGTKLTVLGGGGSDKTHTCPP | |
| | CPAPELLGGPSVFLFPPKPKDTLMISRTPEVTCVVVAVSH | |
| | EDPEVKFNWYVDGVEVHNAKTKPREEQYASTYRVVSVLT | |
| | VLHQDWLNGKEYKCKVSNKALAAPIEKTISKAKGQPREPQ | |
| | VYTLPPCREEMTKNQVSLWCLVKGFYPSDIAVEWESNGQ | |
| | PENNYKTTPPVLDSDGSFFLYSKLTVDKSRWQQGNVFSC | |
| | SVMHEALHNRYTQKSLSLSPGK | |

Trispecific (FIG. 29B)
αMesoxαCD3xCD58IgV

| | | |
|---|---|---|
| αMesothelin Light | DIVMTQSPSSLSASVGDRVTITCRASQSIRYYLSWYQQKP | 812 |
| Chain | GKAPKLLIYTASILQNGVPSRFSGSGSGTDFTLTISSLQPE | |
| | DFATYYCLQTYTTPDFGPGTKVEIKRTVAAPSVFIFPPSDE | |
| | QLKSGTASVVCLLNNFYPREAKVQWKVDNALQSGNSQE | |
| | SVTEQDSKDSTYSLSSTLTLSKADYEKHKVYACEVTHQGL | |
| | SSPVTKSFNRGEC | |
| αMesothelin_Fab- | QVQLVQSGAEVEKPGASVKVSCKASGYTFTDYYMHWVR | 814 |
| αCD3_scFv-Fc | QAPGQGLEWMGWINPNSGGTNYAQKFQGRVTMTRDTSI | |
| | STAYMELSRLRSDDTAVYYCASGWDFDYWGQGTLVTVS | |
| | SASTKGPSVFPLAPSSKSTSGGTAALGCLVKDYFPEPVTV | |
| | SWNSGALTSGVHTFPAVLQSSGLYSLSSVVTVPSSSLGT | |
| | QTYICNVNHKPSNTKVDKRVEPKSCGGGGSGGGGSEVQ | |
| | LVESGGGLVQPGGSLKLSCAASGFTFNTYAMNWVRQAS | |
| | GKGLEWVGRIRSKYNNYATYYADSVKDRFTISRDDSKSTL | |
| | YLQMNSLKTEDTAVYYCVRHGNFGNSYVSWFAYWGQGT | |
| | LVTVSSGGGGSGGGGSGGGGSGGGGSQAVVTQEPSLT | |
| | VSPGGTVTLTCRSSTGAVTTSNYANWVQQKPGQAPRGLI | |
| | GGTNKRAPWTPARFSGSLLGDKAALTLSGAQPEDEAEYF | |
| | CALWYSNLWVFGGGTKLTVLGGGGSDKTHTCPPCPAPE | |
| | LLGGPSVFLFPPKPKDTLMISRTPEVTCVVVAVSHEDPEV | |
| | KFNWYVDGVEVHNAKTKPREEQYGSTYRVVSVLTVLHQ | |
| | DWLNGKEYKCKVSNKALAAPIEKTISKAKGQPREPQVCTL | |
| | PPSRDELTKNQVSLSCAVKGFYPSDIAVEWESNGQPENN | |
| | YKTTPPVLDSDGSFFLVSKLTVDKSRWQQGNVFSCSVMH | |
| | EALHNHYTQKSLSLSPGK | |
| CD58 IgV-Fc | SQQIYGVVYGNVTFHVPSNVPLKEVLWKKQKDKVAELEN | 744 |
| | SEFRAFSSFKNRVYLDTVSGSLTIYNLTSSDEDEYEMESP | |
| | NITDTMKFFLYVLESGGGGSDKTHTCPPCPAPELLGGPSV | |
| | FLFPPKPKDTLMISRTPEVTCVVVAVSHEDPEVKFNWYVD | |
| | GVEVHNAKTKPREEQYASTYRVVSVLTVLHQDWLNGKEY | |
| | KCKVSNKALAAPIEKTISKAKGQPREPQVYTLPPCREEMT | |
| | KNQVSLWCLVKGFYPSDIAVEWESNGQPENNYKTTPPVL | |
| | DSDGSFFLYSKLTVDKSRWQQGNVFSCSVMHEALHNRY | |
| | TQKSLSLSPGK | |

[0658] Re-directed T cell cytotoxicity assays were performed using the constructs as described in Example 1, using human huMesothlin-expressing OVCAR8 target cells (cultured in DMEM medium with 10% FBS) and human pan T effector cells at an E:T ratio of 5:1 and an incubation of 48 hours.

[0659] Cytokine release assays were also performed. Secreted cytokines were measured in the supernatant of trispecific or bispecific treated effector and target cell co-cultures using huMesothelin-expressing Ovcar8 target cells (cultured in DMEM medium with 10% FBS) and human pan T effector cells at an E:T ratio of 5:1 and an incubation of 24 hr.

[0660] 7.7.2. Results

[0661] The results of the re-directed T cell cytotoxicity assay are shown in FIG. 30. The TBM showed superior cytotoxic activity compared to the bispecific construct.

[0662] Results of the cytokine release assay are shown in FIG. 31. The trispecific construct targeting human CD3, human CD2 and human mesothelin produced cytokine levels that are at least comparable to the bispecific molecule targeting human CD3 and human mesothelin.

### 7.8. Example 8: Production and Characterization of an Anti-CD19-Anti-CD3-Anti-CD2 TBM with CD48 as the CD2 Binding Arm

[0663] 7.8.1. Materials and Methods

[0664] 7.8.1.1. Gene Construction, Expression and Purification of Bi- and Tri-Specific Binding Molecules

[0665] A trispecific construct is made as in Example 1, but with a CD48 moiety substituted for the CD58 moiety. The trispecific construct is represented schematically in FIG. 32. Amino acid sequences for the construct are shown in Table 26.

TABLE 26
Amino Acid Sequences of the Tri-specific Construct of Example 8
(CD19Fab/hCD3 scFv-CD48 ligand 1x1 format)

| | | SEQ |
|---|---|---|
| Component | Sequence | ID NO: |
| CD48 ligand (positions | QGHLVHMTVVSGSNVTLNISESLPENYKQLTWFYTFDQKI | 815 |
| 27-220 of UniProt | VEWDSRKSKYFESKFKGRVRLDPQSGALYISKVQKEDNS | |
| identifier P09326) | TYIMRVLKKTGNEQEWKIKLQVLDPVPKPVIKIEKIEDMDD | |
| | NCYLKLSCVIPGESVNYTWYGDKRPFPKELQNSVLETTLM | |
| | PHNYSRCYTCQVSNSVSSKNGTVCLSPPCTLARS | |
| αCD19 Light chain | EIVMTQSPATLSLSPGERATLSCRASQDISKYLNWYQQKP | 736 |
| | GQAPRLLIYHTSRLHSGIPARFSGSGSGTDYTLTISSLQPE | |
| | DFAVYFCQQGNTLPYTFGQGTKLEIKRTVAAPSVFIFPPS | |
| | DEQLKSGTASVVCLLNNFYPREAKVQWKVDNALQSGNS | |
| | QESVTEQDSKDSTYSLSSTLTLSKADYEKHKVYACEVTH | |
| | QGLSSPVTKSFNRGEC | |
| Full CD19-CD3 arm | QVQLQESGPGLVKPSETLSLTCTVSGVSLPDYGVSWIRQ | 738 |
| | PPGKGLEWIGVIWGSETTYYQSSLKSRVTISKDNSKNQVS | |
| | LKLSSVTAADTAVYYCAKHYYYGGSYAMDYWGQGTLVTV | |
| | SSASTKGPSVFPLAPSSKSTSGGTAALGCLVKDYFPEPVT | |
| | VSWNSGALTSGVHTFPAVLQSSGLYSLSSVVTVPSSSLG | |
| | TQTYICNVNHKPSNTKVDKRVEPKSCGGGGSGGGGSEV | |
| | QLVESGGGLVQPGGSLKLSCAASGFTFNTYAMNWVRQA | |
| | SGKGLEWVGRIRSKYNNYATYYADSVKDRFTISRDDSKS | |
| | TLYLQMNSLKTEDTAVYYCVRHGNFGNSYVSWFAYWGQ | |
| | GTLVTVSSGGGGSGGGGSGGGGSGGGGSQAVVTQEPS | |
| | LTVSPGGTVTLTCRSSTGAVTTSNYANVWQQKPGQAPR | |
| | GLIGGTNKRAPWTPARFSGSLLGDKAALTLSGAQPEDEA | |
| | EYFCALWYSNLWVFGGGTKLTVLGGGGSDKTHTCPPCP | |
| | APELLGGPSVFLFPPKPKDTLMISRTPEVTCVVVAVSHED | |
| | PEVKFNWYVDGVEVHNAKTKPREEQYGSTYRVVSVLTVL | |
| | HQDWLNGKEYKCKVSNKALAAPIEKTISKAKGQPREPQV | |
| | CTLPPSRDELTKNQVSLSCAVKGFYPSDIAVEWESNGQP | |
| | ENNYKTTPPVLDSDGSFFLVSKLTVDKSRWQQGNVFSCS | |
| | VMHEALHNHYTQKSLSLSPGK | |
| Full CD48 ligand arm | QGHLVHMTVVSGSNVTLNISESLPENYKQLTWFYTFDQKI | 816 |
| | VEWDSRKSKYFESKFKGRVRLDPQSGALYISKVQKEDNS | |
| | TYIMRVLKKTGNEQEWKIKLQVLDPVPKPVIKIEKIEDMDD | |
| | NCYLKLSCVIPGESVNYTWYGDKRPFPKELQNSVLETTLM | |
| | PHNYSRCYTCQVSNSVSSKNGTVCLSPPCTLARSGGGS | |
| | DKTHTCPPCPAPELLGGPSVFLFPPKPKDTLMISRTPEVT | |
| | CVVVDVSHEDPEVKFNWYVDGVEVHNAKTKPREEQYAS | |
| | TYRVVSVLTVLHQDWLNGKEYKCKVSNKALPAPIEKTISK | |
| | AKGQPREPQVYTLPPCREEMTKNQVSLWCLVKGFYPSDI | |
| | AVEWESNGQPENNYKTTPPVLDSDGSFFLYSKLTVDKSR | |
| | WQQGNVFSCSVMHEALHNRYTQKSLSLSPGK | |

[0666] The TBM is expressed and purified according to the protocol described in Example 1.

[0667] A re-directed T cell cytotoxicity assay, proliferation assay, cytokine release assay, and granzyme B ELISpot assay are performed as in Example 1, with the anti-CD19-anti-CD3 bispecfiic construct described in Example 1 as comparator molecule.

[0668] 7.8.2. Results

[0669] 7.8.2.1. Results

[0670] The TBM construct induces superior cytotoxicity in huCD19-expressing Nalm6 target cells compared to the bispecific construct in an assay performed with a final E:T ratio of 5:1 and either 24 or 48 hour incubation.

[0671] The TBM construct induces superior cytotoxic activity in huCD19-expressing Daudi target cells compared to the bispecific construct in an assay performed with a final E:T ratio of 5:1 and 48 hour incubation.

[0672] The TBM construct does not induce apoptosis of the negative control K562 cell line, which does not express human CD19, in an assay performed with a final E:T ratio of 5:1 and 48 hour incubation.

[0673] The TBM exhibits comparable or superior potency and efficacy compared to the bispecific construct in huCD19-expressing Nalm6 target cells when using human cryopreserved PBMCs that are thawed and rested overnight prior to use and with a final E:T ratio of 10:1 and 24 hour incubation.

[0674] The TBM construct induces superior cytotoxic activity in huCD19-expressing Nalm6 target cells compared to the bispecific when using human cryopreserved PBMCs from a patient diagnosed with acute myeloid leukemia (Hemacare #PB009C-1-AML) that are thawed and rested overnight prior to use and with a final E:T ratio of 10:1 and 24 hour incubation.

[0675] In a rechallenge assay with huCD19 expressing Nalm6 target cells, the TBM continues to induce apoptosis up to 120 hours with little apparent loss in activity across each rechallenge while the bispecific construct loses significant potency and activity with each subsequent target cell addition.

[0676] The trispecific construct mediates higher levels of CD25 and double positive expression (CD25 and CD69) compared to the bispecific construct in both the CD4 and CD8 compartments.

[0677] The trispecific construct mediates higher levels of PD1, LAG3 and TIM3 compared to the bispecific construct in both the CD4 and CD8 compartments.

[0678] The trispecific construct mediates a greater amount of central memory T cells compared to the bispecific construct.

[0679] The TBM induces proliferation of CD8+ T cells.

[0680] The trispecific molecule induces production of IFNγ, TNFα, IL2, IL6 and IL10 in human pan T effector cells in the presence of huCD19-expressing Nalm6 target cells.

[0681] The number of Granzyme B spotforming T cells is higher upon treatment with the CD2-CD3-CD19-targeting TBM than with the bispecific construct.

### 8. SPECIFIC EMBODIMENTS, CITATION OF REFERENCES

[0682] While various specific embodiments have been illustrated and described, it will be appreciated that various changes can be made without departing from the spirit and scope of the disclosure(s). The present disclosure is exemplified by the numbered embodiments set forth below.

[0683] 1. A trispecific binding molecule (TBM), comprising:
[0684] (a) an antigen-binding module 1 (ABM1) that binds specifically to human CD2;
[0685] (b) an antigen-binding module 2 (ABM2) that binds specifically to a component of a human T-cell receptor (TCR) complex; and
[0686] (c) an antigen-binding module 3 (ABM3) that binds specifically to a human tumor-associated antigen (TAA),
   optionally wherein each antigen-binding module is capable of binding its respective target at the same time as each of the other antigen-binding modules is bound to its respective target.

[0687] 2. The TBM of embodiment 1, wherein ABM1 comprises a receptor binding domain of a CD2 ligand.

[0688] 3. The TBM of embodiment 2, wherein the CD2 ligand is CD58.

[0689] 4. The TBM of embodiment 2, wherein the CD2 ligand is CD48.

[0690] 5. The TBM of embodiment 1, wherein ABM1 is a CD58 moiety.

[0691] 6. The TBM of embodiment 5, wherein the CD58 moiety comprises the amino acid sequence of CD58-5.

[0692] 7. The TBM of embodiment 6, wherein the amino acid designated as J is a valine.

[0693] 8. The TBM of embodiment 6, wherein the amino acid designated as J is a lysine.

[0694] 9. The TBM of any one of embodiments 6 to 8, wherein the amino acid designated as O is a valine.

[0695] 10. The TBM of any one of embodiments 6 to 8, wherein the amino acid designated as O is a glutamine.

[0696] 11. The TBM of embodiment 5, wherein the CD58 moiety comprises the amino acid sequence of CD58-3.

[0697] 12. The TBM of embodiment 11, wherein the amino acid designated as B is a phenylalanine.

[0698] 13. The TBM of embodiment 11, wherein the amino acid designated as B is a serine.

[0699] 14. The TBM of any one of embodiments 11 to 13, wherein the amino acid designated as J is a valine.

[0700] 15. The TBM of any one of embodiments 11 to 13, wherein the amino acid designated as J is a lysine.

[0701] 16. The TBM of any one of embodiments 11 to 15, wherein the amino acid designated as O is a valine.

[0702] 17. The TBM of any one of embodiments 11 to 15, wherein the amino acid designated as O is a glutamine.

[0703] 18. The TBM of any one of embodiments 11 to 17, wherein the amino acid designated as U is a valine.

[0704] 19. The TBM of any one of embodiments 11 to 17, wherein the amino acid designated as U is a lysine.

[0705] 20. The TBM of any one of embodiments 11 to 19, wherein the amino acid designated as X is a threonine.

[0706] 21. The TBM of any one of embodiments 11 to 19, wherein the amino acid designated as X is a serine.

[0707] 22. The TBM of any one of embodiments 11 to 21, wherein the amino acid designated as Z is a leucine.

[0708] 23. The TBM of any one of embodiments 11 to 21, wherein the amino acid designated as X is a glycine.

[0709] 24. The TBM of embodiment 2, wherein the CD58 moiety comprises amino acids 1-94 of CD58-2.

[0710] 25. The TBM of embodiment 1, wherein ABM1 is a CD48 moiety.

[0711] 26. The TBM of embodiment 25, wherein the CD48 moiety has at least 70% sequence identity to amino acids 27-220 of the amino acid sequence of Uniprot identifier P09326.

[0712] 27. The TBM of embodiment 25, wherein the CD48 moiety has at least 80% sequence identity to amino acids 27-220 of the amino acid sequence of Uniprot identifier P09326.

[0713] 28. The TBM of embodiment 25, wherein the CD48 moiety has at least 90% sequence identity to amino acids 27-220 of the amino acid sequence of Uniprot identifier P09326.

[0714] 29. The TBM of embodiment 25, wherein the CD48 moiety has at least 95% sequence identity to f amino acids 27-220 of the amino acid sequence of Uniprot identifier P09326.

[0715] 30. The TBM of embodiment 25, wherein the CD48 moiety has at least 99% sequence identity to amino acids 27-220 of the amino acid sequence of Uniprot identifier P09326.

[0716] 31. The TBM of embodiment 1, wherein ABM1 is an anti-CD2 antibody or an antigen-binding domain thereof.

[0717] 32. The TBM of embodiment 31, wherein ABM1 comprises the CDR sequences of CD2-1.

[0718] 33. The TBM of embodiment 32, wherein ABM1 comprises the heavy and light chain variable sequences of CD2-1.

[0719] 34. The TBM of embodiment 32, wherein ABM1 comprises the heavy and light chain variable sequences of hu1CD2-1.

[0720] 35. The TBM of embodiment 32, wherein ABM1 comprises the heavy and light chain variable sequences of hu2CD2-1.

[0721] 36. The TBM of embodiment 31, wherein ABM1 comprises the CDR sequences of Medi 507.

[0722] 37. The TBM of embodiment 36, wherein ABM1 comprises the heavy and light chain variable sequences of Medi 507.

[0723] 38. The TBM of any one of embodiments 1 to 37, wherein the component of the TCR complex is CD3.

[0724] 39. The TBM of embodiment 38, wherein ABM2 is an anti-CD3 antibody or an antigen-binding domain thereof.

[0725] 40. The TBM of embodiment 39, wherein ABM2 comprises the CDR sequences of CD3-1.

[0726] 41. The TBM of embodiment 39, wherein ABM2 comprises the CDR sequences of CD3-2.

[0727] 42. The TBM of embodiment 39, wherein ABM2 comprises the CDR sequences of CD3-3.

[0728] 43. The TBM of embodiment 39, wherein ABM2 comprises the CDR sequences of CD3-4.

[0729] 44. The TBM of embodiment 39, wherein ABM2 comprises the CDR sequences of CD3-5.

[0730] 45. The TBM of embodiment 39, wherein ABM2 comprises the CDR sequences of CD3-6.

[0731] 46. The TBM of embodiment 39, wherein ABM2 comprises the CDR sequences of CD3-7.

[0732] 47. The TBM of embodiment 39, wherein ABM2 comprises the CDR sequences of CD3-8.

[0733] 48. The TBM of embodiment 39, wherein ABM2 comprises the CDR sequences of CD3-9.

[0734] 49. The TBM of embodiment 39, wherein ABM2 comprises the CDR sequences of CD3-10.

[0735] 50. The TBM of embodiment 39, wherein ABM2 comprises the CDR sequences of CD3-11.

[0736] 51. The TBM of embodiment 39, wherein ABM2 comprises the CDR sequences of CD3-12.

[0737] 52. The TBM of embodiment 39, wherein ABM2 comprises the CDR sequences of CD3-13.

[0738] 53. The TBM of embodiment 39, wherein ABM2 comprises the CDR sequences of CD3-14.

[0739] 54. The TBM of embodiment 39, wherein ABM2 comprises the CDR sequences of CD3-15.

[0740] 55. The TBM of embodiment 39, wherein ABM2 comprises the CDR sequences of CD3-16.

[0741] 56. The TBM of embodiment 39, wherein ABM2 comprises the CDR sequences of CD3-17.

[0742] 57. The TBM of embodiment 39, wherein ABM2 comprises the CDR sequences of CD3-18.

[0743] 58. The TBM of embodiment 39, wherein ABM2 comprises the CDR sequences of CD3-19.

[0744] 59. The TBM of embodiment 39, wherein ABM2 comprises the CDR sequences of CD3-20.

[0745] 60. The TBM of embodiment 39, wherein ABM2 comprises the CDR sequences of CD3-21.

[0746] 61. The TBM of any one of embodiment 40 to embodiment 60, wherein the CDRs are defined by Kabat numbering, as set forth in Table 7B.

[0747] 62. The TBM of any one of embodiment 40 to embodiment 60, wherein the CDRs are defined by Chothia numbering, as set forth in Table 7C.

[0748] 63. TBM of any one of embodiment 40 to embodiment 60, wherein the CDRs are defined by a combination of Kabat and Chothia numbering, as set forth in Table 7D.

[0749] 64. The TBM of embodiment 39, wherein ABM2 comprises the heavy and light chain variable sequences of CD3-1, as set forth in Table 7A.

[0750] 65. The TBM of embodiment 39, wherein ABM2 comprises the heavy and light chain variable sequences of CD3-2, as set forth in Table 7A.

[0751] 66. The TBM of embodiment 39, wherein ABM2 comprises the heavy and light chain variable sequences of CD3-3, as set forth in Table 7A.

[0752] 67. The TBM of embodiment 39, wherein ABM2 comprises the heavy and light chain variable sequences of CD3-4, as set forth in Table 7A.

[0753] 68. The TBM of embodiment 39, wherein ABM2 comprises the heavy and light chain variable sequences of CD3-5, as set forth in Table 7A.

[0754] 69. The TBM of embodiment 39, wherein ABM2 comprises the heavy and light chain variable sequences of CD3-6, as set forth in Table 7A.

[0755] 70. The TBM of embodiment 39, wherein ABM2 comprises the heavy and light chain variable sequences of CD3-7, as set forth in Table 7A.

[0756] 71. The TBM of embodiment 39, wherein ABM2 comprises the heavy and light chain variable sequences of CD3-8, as set forth in Table 7A.

[0757] 72. The TBM of embodiment 39, wherein ABM2 comprises the heavy and light chain variable sequences of CD3-9, as set forth in Table 7A.

[0758] 73. The TBM of embodiment 39, wherein ABM2 comprises the heavy and light chain variable sequences of CD3-10, as set forth in Table 7A.

[0759] 74. The TBM of embodiment 39, wherein ABM2 comprises the heavy and light chain variable sequences of CD3-11, as set forth in Table 7A.

[0760] 75. The TBM of embodiment 39, wherein ABM2 comprises the heavy and light chain variable sequences of CD3-12, as set forth in Table 7A.

[0761] 76. The TBM of embodiment 39, wherein ABM2 comprises the heavy and light chain variable sequences of CD3-13, as set forth in Table 7A.

[0762] 77. The TBM of embodiment 39, wherein ABM2 comprises the heavy and light chain variable sequences of CD3-14, as set forth in Table 7A.

[0763] 78. The TBM of embodiment 39, wherein ABM2 comprises the heavy and light chain variable sequences of CD3-15, as set forth in Table 7A.

[0764] 79. The TBM of embodiment 39, wherein ABM2 comprises the heavy and light chain variable sequences of CD3-16, as set forth in Table 7A.

[0765] 80. The TBM of embodiment 39, wherein ABM2 comprises the heavy and light chain variable sequences of CD3-17, as set forth in Table 7A.

[0766] 81. The TBM of embodiment 39, wherein ABM2 comprises the heavy and light chain variable sequences of CD3-18, as set forth in Table 7A.

[0767] 82. The TBM of embodiment 39, wherein ABM2 comprises the heavy and light chain variable sequences of CD3-19, as set forth in Table 7A.

[0768] 83. The TBM of embodiment 39, wherein ABM2 comprises the heavy and light chain variable sequences of CD3-20, as set forth in Table 7A.

[0769] 84. The TBM of embodiment 39, wherein ABM2 comprises the heavy and light chain variable sequences of CD3-21, as set forth in Table 7A.

[0770] 85. The TBM of embodiment 39, wherein ABM2 comprises the CDR sequences of OKT3.

[0771] 86. The TBM of embodiment 85, wherein the CDRs are defined by Kabat numbering, as set forth in Table 23B.

[0772] 87. The TBM of embodiment 85, wherein the CDRs are defined by Chothia numbering, as set forth in Table 23B.

[0773] 88. The TBM of embodiment 85, wherein the CDRs are defined by IMGT numbering, as set forth in Table 23B.

[0774] 89. TBM of embodiment 85, wherein the CDRs are defined by a combination of Kabat and Chothia numbering, as set forth in Table 23B.

[0775] 90. TBM of embodiment 85, wherein ABM2 comprises the heavy and light chain variable sequences of OKT3, as set forth in Table 23B.

[0776] 91. The TBM of any one of embodiments 1 to 35, wherein the component of the TCR complex is TCR-α, TCR-β, or a TCR-α/β dimer.

[0777] 92. The TBM of embodiment 91, wherein ABM2 is an antibody or an antigen-binding domain thereof.

[0778] 93. The TBM of embodiment 92, wherein ABM2 comprises the CDR sequences of BMA031.

[0779] 94. The TBM of embodiment 93, wherein the CDR sequences are defined as in Table 8.

[0780] 95. The TBM of embodiment 93, wherein the CDR sequences are defined by Kabat numbering, as set forth in Table 23A.

[0781] 96. The TBM of embodiment 93, wherein the CDR sequences are defined by IMGT numbering, as set forth in Table 23A.

[0782] 97. The TBM of embodiment 93, wherein the CDR sequences are defined by Chothia numbering, as set forth in Table 23A.

[0783] 98. The TBM of embodiment 93, wherein the CDR sequences are defined by a combination of Kabat and Chothia numbering, as set forth in Table 23A.

[0784] 99. The TBM of embodiment 93, wherein ABM2 comprises the heavy and light chain variable sequences of BMA031.

[0785] 100. The TBM of any any one of embodiments 1 to 35, wherein the component of the TCR complex is TCR-γ, TCR-δ, or a TCR-γ/δ dimer.

[0786] 101. The TBM of embodiment 100, wherein ABM2 is an antibody or an antigen-binding domain thereof.

[0787] 102. The TBM of embodiment 101 wherein ABM2 comprises the CDR sequences of OTCS1.

[0788] 103. The TBM of embodiment 102, wherein the CDR sequences are defined by Kabat numbering.

[0789] 104. The TBM of embodiment 102, wherein the CDR sequences are defined by Chothia numbering.

[0790] 105. The TBM of embodiment 102, wherein the CDR sequences are defined by a combination of Kabat and Chothia numbering.

[0791] 106. The TBM of embodiment 102, wherein ABM2 comprises the heavy and light chain variable sequences of OTCS1.

[0792] 107. The TBM of any one of embodiments 1 to 106 wherein ABM3 is an anti-TAA antibody or an antigen-binding domain thereof.

[0793] 108. The TBM of embodiment 107, wherein the TAA is TSHR, CD171, CS-1, CLL-1, GD3, Tn Ag, FLT3, CD38, CD44v6, B7H3, KIT, IL-13Ra2, IL-11Ra, PSCA, PRSS21, VEGFR2, LewisY, CD24, PDGFR-beta, SSEA-4, MUC1, EGFR, NCAM, CAIX, LMP2, EphA2, fucosyl GM1, sLe, GM3, TGS5, HMWMAA, o-acetyl-GD2, GD2, folate receptor alpha, folate receptor beta, TEM1/CD248, TEM7R, CLDN6, GPRC5D, CXORF61, CD97, CD179a, ALK, polysialic acid, PLAC1, GloboH, NY-BR-1, UPK2, HAVCR1, ADRB3, PANX3, GPR20, LY6K, OR51E2, TAARP, WT1, ETV6-AML, sperm protein 17, XAGE1, Tie 2, MAD-CT-1, MAD-CT-2, Fos-related antigen 1, p53 mutant, hTERT, sarcoma translocation breakpoints, ML-IAP, ERG (TMPRSS2 ETS fusion gene), NA17, PAX3, Androgen receptor, Cyclin B1, MYCN, RhoC, CYP1B1, BORIS, SART3, PAX5, OY-TES1, LCK, AKAP-4, SSX2, CD79a, CD79b, CD72, LAIR1, FCAR, LILRA2, CD300LF, CLEC12A, BST2, EMR2, LY75, GPC3, FCRL5, IGLL1, CD19, CD20, CD30, ERBB2, ROR1, FLT3, TAAG72, CD22, CD33, GD2, BCMA, gp100Tn, FAP, tyrosinase, EPCAM, CEA, Igf-I receptor, EphB2, mesothelin, Cadherin17, CD32b, EGFRvIII, GPNMB, GPR64, HER3, LRP6, LYPD8, NKG2D, SLC34A2, SLC39A6, SLITRK6, or TACSTD2.

[0794] 109. The TBM of embodiment 108, wherein the anti-TAA antibody or antigen-binding domain thereof has the CDR sequences of an antibody set forth in Table 11.

[0795] 110. The TBM of embodiment 108, wherein the anti-TAA antibody or antigen-binding domain thereof has the heavy and light chain variable region sequences of an antibody set forth in Table 11.

[0796] 111. The TBM of embodiment 109 or embodiment 110, wherein the anti-TAA antibody or antigen-binding domain thereof binds to CD22.

[0797] 112. The TBM of embodiment 109 or embodiment 110, wherein the anti-TAA antibody or antigen-binding domain thereof binds to CS1.

[0798] 113. The TBM of embodiment 109 or embodiment 110, wherein the anti-TAA antibody or antigen-binding domain thereof binds to CD33.

[0799] 114. The TBM of embodiment 109 or embodiment 110, wherein the anti-TAA antibody or antigen-binding domain thereof binds to GD2.

[0800] 115. The TBM of embodiment 109 or embodiment 110, wherein the anti-TAA antibody or antigen-binding domain thereof binds to BCMA.

[0801] 116. The TBM of embodiment 109 or embodiment 110, wherein the anti-TAA antibody or antigen-binding domain thereof binds to Tn.

[0802] 117. The TBM of embodiment 109 or embodiment 110, wherein the anti-TAA antibody or antigen-binding domain thereof binds to PSMA.

[0803] 118. The TBM of embodiment 109 or embodiment 110, wherein the anti-TAA antibody or antigen-binding domain thereof binds to ROR1.

[0804] 119. The TBM of embodiment 109 or embodiment 110, wherein the anti-TAA antibody or antigen-binding domain thereof binds to FLT3.

[0805] 120. The TBM of embodiment 109 or embodiment 110, wherein the anti-TAA antibody or antigen-binding domain thereof binds to TAAG72.

[0806] 121. The TBM of embodiment 109 or embodiment 110, wherein the anti-TAA antibody or antigen-binding domain thereof binds to FAP.

[0807] 122. The TBM of embodiment 109 or embodiment 110, wherein the anti-TAA antibody or antigen-binding domain thereof binds to CD38.

[0808] 123. The TBM of embodiment 109 or embodiment 110, wherein the anti-TAA antibody or antigen-binding domain thereof binds to CD44v6.

[0809] 124. The TBM of embodiment 109 or embodiment 110, wherein the anti-TAA antibody or antigen-binding domain thereof binds to CEA.

[0810] 125. The TBM of embodiment 109 or embodiment 110, wherein the anti-TAA antibody or antigen-binding domain thereof binds to EPCAM.

[0811] 126. The TBM of embodiment 109 or embodiment 110, wherein the anti-TAA antibody or antigen-binding domain thereof binds to PRSS21.

[0812] 127. The TBM of embodiment 109 or embodiment 110, wherein the anti-TAA antibody or antigen-binding domain thereof binds to B7H3.

[0813] 128. The TBM of embodiment 109 or embodiment 110, wherein the anti-TAA antibody or antigen-binding domain thereof binds to KIT.

[0814] 129. The TBM of embodiment 109 or embodiment 110, wherein the anti-TAA antibody or antigen-binding domain thereof binds to IL-13Ra2.

[0815] 130. The TBM of embodiment 109 or embodiment 110, wherein the anti-TAA antibody or antigen-binding domain thereof binds to CD30.

[0816] 131. The TBM of embodiment 109 or embodiment 110, wherein the anti-TAA antibody or antigen-binding domain thereof binds to GD3.

[0817] 132. The TBM of embodiment 109 or embodiment 110, wherein the anti-TAA antibody or antigen-binding domain thereof binds to CD171.

[0818] 133. The TBM of embodiment 109 or embodiment 110, wherein the anti-TAA antibody or antigen-binding domain thereof binds to IL-11Ra.

[0819] 134. The TBM of embodiment 109 or embodiment 110, wherein the anti-TAA antibody or antigen-binding domain thereof binds to PSCA.

[0820] 135. The TBM of embodiment 109 or embodiment 110, wherein the anti-TAA antibody or antigen-binding domain thereof binds to VEGFR2.

[0821] 136. The TBM of embodiment 109 or embodiment 110, wherein the anti-TAA antibody or antigen-binding domain thereof binds to LewisY.

[0822] 137. The TBM of embodiment 109 or embodiment 110, wherein the anti-TAA antibody or antigen-binding domain thereof binds to CD24.

[0823] 138. The TBM of embodiment 109 or embodiment 110, wherein the anti-TAA antibody or antigen-binding domain thereof binds to PDGFR-beta.

[0824] 139. The TBM of embodiment 109 or embodiment 110, wherein the anti-TAA antibody or antigen-binding domain thereof binds to SSEA-4.

[0825] 140. The TBM of embodiment 109 or embodiment 110, wherein the anti-TAA antibody or antigen-binding domain thereof binds to CD20.

[0826] 141. The TBM of embodiment 109 or embodiment 110, wherein the anti-TAA antibody or antigen-binding domain thereof binds to folate receptor alpha.

[0827] 142. The TBM of embodiment 109 or embodiment 110, wherein the anti-TAA antibody or antigen-binding domain thereof binds to ERBB2.

[0828] 143. The TBM of embodiment 109 or embodiment 110, wherein the anti-TAA antibody or antigen-binding domain thereof binds to MUC1.

[0829] 144. The TBM of embodiment 109 or embodiment 110, wherein the anti-TAA antibody or antigen-binding domain thereof binds to EGFR.

[0830] 145. The TBM of embodiment 109 or embodiment 110, wherein the anti-TAA antibody or antigen-binding domain thereof binds to NCAM.

[0831] 146. The TBM of embodiment 109 or embodiment 110, wherein the anti-TAA antibody or antigen-binding domain thereof binds to ephrin B2

[0832] 147. The TBM of embodiment 109 or embodiment 110, wherein the anti-TAA antibody or antigen-binding domain thereof binds to IGF-I receptor.

[0833] 148. The TBM of embodiment 109 or embodiment 110, wherein the anti-TAA antibody or antigen-binding domain thereof binds to CAIX.

[0834] 149. The TBM of embodiment 109 or embodiment 110, wherein the anti-TAA antibody or antigen-binding domain thereof binds to LMP2.

[0835] 150. The TBM of embodiment 109 or embodiment 110, wherein the anti-TAA antibody or antigen-binding domain thereof binds to gp100.

[0836] 151. The TBM of embodiment 109 or embodiment 110, wherein the anti-TAA antibody or antigen-binding domain thereof binds to tyrosinase.

[0837] 152. The TBM of embodiment 109 or embodiment 110, wherein the anti-TAA antibody or antigen-binding domain thereof binds to ephA2.

[0838] 153. The TBM of embodiment 109 or embodiment 110, wherein the anti-TAA antibody or antigen-binding domain thereof binds to mesothelin.

[0839] 154. The TBM of embodiment 109 or embodiment 110, wherein the anti-TAA antibody or antigen-binding domain thereof binds to ALK.

[0840] 155. The TBM of embodiment 109 or embodiment 110, wherein the anti-TAA antibody or antigen-binding domain thereof binds to CD19.

[0841] 156. The TBM of embodiment 109 or embodiment 110, wherein the anti-TAA antibody or antigen-binding domain thereof binds to CD97.

[0842] 157. The TBM of embodiment 109 or embodiment 110, wherein the anti-TAA antibody or antigen-binding domain thereof binds to CLDN6.

[0843] 158. The TBM of embodiment 109 or embodiment 110, wherein the anti-TAA antibody or antigen-binding domain thereof binds to EGFRvIII.

[0844] 159. The TBM of embodiment 109 or embodiment 110, wherein the anti-TAA antibody or antigen-binding domain thereof binds to folate receptor beta.

[0845] 160. The TBM of embodiment 109 or embodiment 110, wherein the anti-TAA antibody or antigen-binding domain thereof binds to GloboH.

[0846] 161. The TBM of embodiment 109 or embodiment 110, wherein the anti-TAA antibody or antigen-binding domain thereof binds to GPRC5D.

[0847] 162. The TBM of embodiment 109 or embodiment 110, wherein the anti-TAA antibody or antigen-binding domain thereof binds to HMWMAA.

[0848] 163. The TBM of embodiment 109 or embodiment 110, wherein the anti-TAA antibody or antigen-binding domain thereof binds to LRP6.

[0849] 164. The TBM of embodiment 109 or embodiment 110, wherein the anti-TAA antibody or antigen-binding domain thereof binds to NY-BR-1.

[0850] 165. The TBM of embodiment 109 or embodiment 110, wherein the anti-TAA antibody or antigen-binding domain thereof binds to PLAC1.

[0851] 166. The TBM of embodiment 109 or embodiment 110, wherein the anti-TAA antibody or antigen-binding domain thereof binds to polysialic acid.

[0852] 167. The TBM of embodiment 109 or embodiment 110, wherein the anti-TAA antibody or antigen-binding domain thereof binds to TEM1/CD248.

[0853] 168. The TBM of embodiment 109 or embodiment 110, wherein the anti-TAA antibody or antigen-binding domain thereof binds to TSHR.

[0854] 169. The TBM of embodiment 107, wherein the TAA is CD19.

[0855] 170. The TBM of embodiment 169, wherein the anti-TAA antibody or antigen-binding domain thereof comprises heavy chain CDRs having the amino acid sequences of CD19-H1, CD19-H2A, and CD19-H3 as set forth in Table 13 and light chain CDRs having the amino acid sequences of CD19-L1, CD19-L2, and CD19-L3 as set forth in Table 13.

[0856] 171. The TBM of embodiment 170, wherein the anti-TAA antibody or antigen-binding domain thereof comprises a heavy chain variable region having the amino acid sequences of VHA as set forth in Table 13 and a light chain variable region having the amino acid sequences of VLA as set forth in Table 13.

[0857] 172. The TBM of embodiment 169, wherein the anti-TAA antibody or antigen-binding domain thereof comprises heavy chain CDRs having the amino acid sequences of CD19-H1, CD19-H2B, and CD19-H3 as set forth in Table 13 and light chain CDRs having the amino acid sequences of CD19-L1, CD19-L2, and CD19-L3 as set forth in Table 13.

[0858] 173. The TBM of embodiment 172, wherein the anti-TAA antibody or antigen-binding domain thereof comprises a heavy chain variable region having the amino acid sequences of VHB as set forth in Table 13 and a light chain variable region having the amino acid sequences of VLB as set forth in Table 13.

[0859] 174. The TBM of embodiment 169, wherein the anti-TAA antibody or antigen-binding domain thereof comprises heavy chain CDRs having the amino acid sequences of CD19-H1, CD19-H2C, and CD19-H3 as set forth in Table 13 and light chain CDRs having the amino acid sequences of CD19-L1, CD19-L2, and CD19-L3 as set forth in Table 13.

[0860] 175. The TBM of embodiment 174, wherein the anti-TAA antibody or antigen-binding domain thereof comprises a heavy chain variable region having the amino acid sequences of VHC as set forth in Table 13 and a light chain variable region having the amino acid sequences of VLB as set forth in Table 13.

[0861] 176. The TBM of embodiment 169, wherein the anti-TAA antibody or antigen-binding domain thereof comprises heavy chain CDRs having the amino acid sequences of CD19-H1, CD19-H2D, and CD19-H3 as set forth in Table 13 and light chain CDRs having the amino acid sequences of CD19-L1, CD19-L2, and CD19-L3 as set forth in Table 13.

[0862] 177. The TBM of embodiment 176, wherein the anti-TAA antibody or antigen-binding domain thereof comprises a heavy chain variable region having the amino acid sequences of VHD as set forth in Table 13 and a light chain variable region having the amino acid sequences of VLB as set forth in Table 13.

[0863] 178. The TBM of embodiment 107, wherein the TAA is Her2.

[0864] 179. The TBM of embodiment 178, wherein ABM3 comprises the CDR sequences of the VH and VL sequences of the anti-Her2 Fab set forth in Table 24.

[0865] 180. The TBM of embodiment 179, wherein the CDRs are defined by Kabat numbering, as set forth in Table 24.

[0866] 181. The TBM of embodiment 179, wherein the CDRs are defined by Chothia numbering, as set forth in Table 24.

[0867] 182. The TBM of embodiment 179, wherein the CDRs are defined by IMGT numbering, as set forth in Table 24.

[0868] 183. The TBM of embodiment 179, wherein the CDRs are defined by a combination of Kabat and Chothia numbering, as set forth in Table 24.

[0869] 184. The TBM of embodiment 178, wherein ABM3 comprises the VH and VL sequences of the anti-Her2 Fab set forth in Table 24.

[0870] 185. The TBM of embodiment 107, wherein the TAA is mesothelin.

[0871] 186. The TBM of embodiment 185, wherein ABM3 comprises the CDR sequences of the VH and VL sequences of the anti-mesothelin Fab set forth in Table 25.

[0872] 187. The TBM of embodiment 186, wherein the CDRs are defined by Kabat numbering, as set forth in Table 25.

[0873] 188. The TBM of embodiment 186, wherein the CDRs are defined by Chothia numbering, as set forth in Table 25.

[0874] 189. The TBM of embodiment 186, wherein the CDRs are defined by IMGT numbering, as set forth in Table 25.

[0875] 190. The TBM of embodiment 186, wherein the CDRs are defined by a combination of Kabat and Chothia numbering, as set forth in Table 25.

[0876] 191. The TBM of embodiment 185, wherein ABM3 comprises the VH and VL sequences of the anti-mesothelin Fab set forth in Table 25.

[0877] 192. The TBM of embodiment 107, wherein the TAA is BCMA.

[0878] 193. The TBM of embodiment 192, wherein ABM3 comprises the CDR sequences of BCMA-1.

[0879] 194. The TBM of embodiment 192, wherein ABM3 comprises the CDR sequences of BCMA-2.

[0880] 195. The TBM of embodiment 192, wherein ABM3 comprises the CDR sequences of BCMA-3.

[0881] 196. The TBM of embodiment 192, wherein ABM3 comprises the CDR sequences of BCMA-4.

[0882] 197. The TBM of embodiment 192, wherein ABM3 comprises the CDR sequences of BCMA-5.

[0883] 198. The TBM of embodiment 192, wherein ABM3 comprises the CDR sequences of BCMA-6.

[0884] 199. The TBM of embodiment 192, wherein ABM3 comprises the CDR sequences of BCMA-7.

[0885] 200. The TBM of embodiment 192, wherein ABM3 comprises the CDR sequences of BCMA-8.

[0886] 201. The TBM of embodiment 192, wherein ABM3 comprises the CDR sequences of BCMA-9.

[0887] 202. The TBM of embodiment 178, wherein ABM3 comprises the CDR sequences of BCMA-10.

[0888] 203. The TBM of embodiment 192, wherein ABM3 comprises the CDR sequences of BCMA-11.

[0889] 204. The TBM of embodiment 192, wherein ABM3 comprises the CDR sequences of BCMA-12.

[0890] 205. The TBM of embodiment 192, wherein ABM3 comprises the CDR sequences of BCMA-13.

[0891] 206. The TBM of embodiment 192, wherein ABM3 comprises the CDR sequences of BCMA-14.

[0892] 207. The TBM of embodiment 192, wherein ABM3 comprises the CDR sequences of BCMA-15.

[0893] 208. The TBM of embodiment 192, wherein ABM3 comprises the CDR sequences of BCMA-16.

[0894] 209. The TBM of embodiment 192, wherein ABM3 comprises the CDR sequences of BCMA-17.

[0895] 210. The TBM of embodiment 192, wherein ABM3 comprises the CDR sequences of BCMA-18.

[0896] 211. The TBM of embodiment 192, wherein ABM3 comprises the CDR sequences of BCMA-19.

[0897] 212. The TBM of embodiment 192, wherein ABM3 comprises the CDR sequences of BCMA-20.

[0898] 213. The TBM of embodiment 192, wherein ABM3 comprises the CDR sequences of BCMA-21.

[0899] 214. The TBM of embodiment 192, wherein ABM3 comprises the CDR sequences of BCMA-22.

[0900] 215. The TBM of embodiment 192, wherein ABM3 comprises the CDR sequences of BCMA-23.

[0901] 216. The TBM of embodiment 192, wherein ABM3 comprises the CDR sequences of BCMA-24.

[0902] 217. The TBM of embodiment 192, wherein ABM3 comprises the CDR sequences of BCMA-25.

[0903] 218. The TBM of embodiment 192, wherein ABM3 comprises the CDR sequences of BCMA-26.

[0904] 219. The TBM of embodiment 192, wherein ABM3 comprises the CDR sequences of BCMA-27.

[0905] 220. The TBM of embodiment 192, wherein ABM3 comprises the CDR sequences of BCMA-28.

[0906] 221. The TBM of embodiment 192, wherein ABM3 comprises the CDR sequences of BCMA-29.

[0907] 222. The TBM of embodiment 192, wherein ABM3 comprises the CDR sequences of BCMA-30.

[0908] 223. The TBM of embodiment 192, wherein ABM3 comprises the CDR sequences of BCMA-31.

[0909] 224. The TBM of embodiment 192, wherein ABM3 comprises the CDR sequences of BCMA-32.

[0910] 225. The TBM of embodiment 192, wherein ABM3 comprises the CDR sequences of BCMA-33.

[0911] 226. The TBM of embodiment 192, wherein ABM3 comprises the CDR sequences of BCMA-34.

[0912] 227. The TBM of embodiment 192, wherein ABM3 comprises the CDR sequences of BCMA-35.

[0913] 228. The TBM of embodiment 192, wherein ABM3 comprises the CDR sequences of BCMA-36.

[0914] 229. The TBM of embodiment 192, wherein ABM3 comprises the CDR sequences of BCMA-37.

[0915] 230. The TBM of embodiment 192, wherein ABM3 comprises the CDR sequences of BCMA-38.

[0916] 231. The TBM of embodiment 192, wherein ABM3 comprises the CDR sequences of BCMA-39.

[0917] 232. The TBM of embodiment 192, wherein ABM3 comprises the CDR sequences of BCMA-40.

[0918] 233. The TBM of any one of embodiments 193 to 232, wherein the CDRs are defined by Kabat numbering, as set forth in Table 12B and 12E.

[0919] 234. The TBM of any one of embodiments 193 to 232, wherein the CDRs are defined by Chothia numbering, as set forth in Table 12C and 12F.

[0920] 235. TBM of any one of embodiments 193 to 232, wherein the CDRs are defined by a combination of Kabat and Chothia numbering, as set forth in Table 12D and 12G.

[0921] 236. The TBM of embodiment 192, wherein ABM3 comprises the heavy and light chain variable sequences of BCMA-1, as set forth in Table 12A.

[0922] 237. The TBM of embodiment 192, wherein ABM3 comprises the heavy and light chain variable sequences of BCMA-2, as set forth in Table 12A.

[0923] 238. The TBM of embodiment 192, wherein ABM3 comprises the heavy and light chain variable sequences of BCMA-3, as set forth in Table 12A.

[0924] 239. The TBM of embodiment 192, wherein ABM3 comprises the heavy and light chain variable sequences of BCMA-4, as set forth in Table 12A.

[0925] 240. The TBM of embodiment 192, wherein ABM3 comprises the heavy and light chain variable sequences of BCMA-5, as set forth in Table 12A.

[0926] 241. The TBM of embodiment 192, wherein ABM3 comprises the heavy and light chain variable sequences of BCMA-6, as set forth in Table 12A.

[0927] 242. The TBM of embodiment 192, wherein ABM3 comprises the heavy and light chain variable sequences of BCMA-7, as set forth in Table 12A.

[0928] 243. The TBM of embodiment 192, wherein ABM3 comprises the heavy and light chain variable sequences of BCMA-8, as set forth in Table 12A.

[0929] 244. The TBM of embodiment 192, wherein ABM3 comprises the heavy and light chain variable sequences of BCMA-9, as set forth in Table 12A.

[0930] 245. The TBM of embodiment 192, wherein ABM3 comprises the heavy and light chain variable sequences of BCMA-10, as set forth in Table 12A.

[0931] 246. The TBM of embodiment 192, wherein ABM3 comprises the heavy and light chain variable sequences of BCMA-11, as set forth in Table 12A.

[0932] 247. The TBM of embodiment 192, wherein ABM3 comprises the heavy and light chain variable sequences of BCMA-12, as set forth in Table 12A.

[0933] 248. The TBM of embodiment 192, wherein ABM3 comprises the heavy and light chain variable sequences of BCMA-13, as set forth in Table 12A.

[0934] 249. The TBM of embodiment 192, wherein ABM3 comprises the heavy and light chain variable sequences of BCMA-14, as set forth in Table 12A.

[0935] 250. The TBM of embodiment 192, wherein ABM3 comprises the heavy and light chain variable sequences of BCMA-15, as set forth in Table 12A.

[0936] 251. The TBM of embodiment 192, wherein ABM3 comprises the heavy and light chain variable sequences of BCMA-16, as set forth in Table 12A.

[0937] 252. The TBM of embodiment 192, wherein ABM3 comprises the heavy and light chain variable sequences of BCMA-17, as set forth in Table 12A.

[0938] 253. The TBM of embodiment 192, wherein ABM3 comprises the heavy and light chain variable sequences of BCMA-18, as set forth in Table 12A.

[0939] 254. The TBM of embodiment 192, wherein ABM3 comprises the heavy and light chain variable sequences of BCMA-19, as set forth in Table 12A.

[0940] 255. The TBM of embodiment 192, wherein ABM3 comprises the heavy and light chain variable sequences of BCMA-20, as set forth in Table 12A.

[0941] 256. The TBM of embodiment 192, wherein ABM3 comprises the heavy and light chain variable sequences of BCMA-21, as set forth in Table 12A.

[0942] 257. The TBM of embodiment 192, wherein ABM3 comprises the heavy and light chain variable sequences of BCMA-22, as set forth in Table 12A.

[0943] 258. The TBM of embodiment 192, wherein ABM3 comprises the heavy and light chain variable sequences of BCMA-23, as set forth in Table 12A.

[0944] 259. The TBM of embodiment 192, wherein ABM3 comprises the heavy and light chain variable sequences of BCMA-24, as set forth in Table 12A.

[0945] 260. The TBM of embodiment 192, wherein ABM3 comprises the heavy and light chain variable sequences of BCMA-25, as set forth in Table 12A.

[0946] 261. The TBM of embodiment 192, wherein ABM3 comprises the heavy and light chain variable sequences of BCMA-26, as set forth in Table 12A.

[0947] 262. The TBM of embodiment 192, wherein ABM3 comprises the heavy and light chain variable sequences of BCMA-27, as set forth in Table 12A.

[0948] 263. The TBM of embodiment 192, wherein ABM3 comprises the heavy and light chain variable sequences of BCMA-28, as set forth in Table 12A.

[0949] 264. The TBM of embodiment 192, wherein ABM3 comprises the heavy and light chain variable sequences of BCMA-29, as set forth in Table 12A.

[0950] 265. The TBM of embodiment 192, wherein ABM3 comprises the heavy and light chain variable sequences of BCMA-30, as set forth in Table 12A.

[0951] 266. The TBM of embodiment 192, wherein ABM3 comprises the heavy and light chain variable sequences of BCMA-31, as set forth in Table 12A.

[0952] 267. The TBM of embodiment 192, wherein ABM3 comprises the heavy and light chain variable sequences of BCMA-32, as set forth in Table 12A.

[0953] 268. The TBM of embodiment 192, wherein ABM3 comprises the heavy and light chain variable sequences of BCMA-33, as set forth in Table 12A.

[0954] 269. The TBM of embodiment 192, wherein ABM3 comprises the heavy and light chain variable sequences of BCMA-34, as set forth in Table 12A.

[0955] 270. The TBM of embodiment 192, wherein ABM3 comprises the heavy and light chain variable sequences of BCMA-35, as set forth in Table 12A.

[0956] 271. The TBM of embodiment 192, wherein ABM3 comprises the heavy and light chain variable sequences of BCMA-36, as set forth in Table 12A.

[0957] 272. The TBM of embodiment 192, wherein ABM3 comprises the heavy and light chain variable sequences of BCMA-37, as set forth in Table 12A.

[0958] 273. The TBM of embodiment 192, wherein ABM3 comprises the heavy and light chain variable sequences of BCMA-38, as set forth in Table 12A.

[0959] 274. The TBM of embodiment 192, wherein ABM3 comprises the heavy and light chain variable sequences of BCMA-39, as set forth in Table 12A.

[0960] 275. The TBM of embodiment 192, wherein ABM3 comprises the heavy and light chain variable sequences of BCMA-40, as set forth in Table 12A.

[0961] 276. The TBM of embodiment 192, wherein ABM3 comprises the heavy and light chain variable sequences of BCMA-40, as set forth in Table 12A.

[0962] 277. The TBM of any one of embodiments 1 to 106, wherein if TAA is a receptor, ABM3 comprises a receptor binding domain of a ligand of the receptor, and if TAA is a ligand, ABM3 comprises a ligand binding domain of a receptor of the ligand.

[0963] 278. The TBM of embodiment 277, wherein the TAA is TSHR, CD171, CS-1, CLL-1, GD3, Tn Ag, FLT3, CD38, CD44v6, B7H3, KIT, IL-13Ra2, IL-11Ra, PSCA, PRSS21, VEGFR2, LewisY, CD24, PDGFR-beta, SSEA-4, MUC1, EGFR, NCAM, CAIX, LMP2, EphA2, fucosyl GM1, sLe, GM3, TGS5, HMWMAA, o-acetyl-GD2, GD2, folate receptor alpha, folate receptor beta, TEM1/CD248, TEM7R, CLDN6, GPRC5D, CXORF61, CD97, CD179a, ALK, polysialic acid, PLAC1, GloboH, NY-BR-1, UPK2, HAVCR1, ADRB3, PANX3, GPR20, LY6K, OR51E2, TAARP, WT1, ETV6-AML, sperm protein 17, XAGE1, Tie 2, MAD-CT-1, MAD-CT-2, Fos-related antigen 1, p53 mutant, hTERT, sarcoma translocation breakpoints, ML-IAP, ERG (TMPRSS2 ETS fusion gene), NA17, PAX3, Androgen receptor, Cyclin B1, MYCN, RhoC, CYP1B1, BORIS, SART3, PAX5, OY-TES1, LCK, AKAP-4, SSX2, CD79a, CD79b, CD72, LAIR1, FCAR, LILRA2, CD300LF, CLEC12A, BST2, EMR2, LY75, GPC3, FCRL5, IGLL1, CD19, CD20, CD30, ERBB2, ROR1, FLT3, TAAG72, CD22, CD33, GD2, BCMA, gp100Tn, FAP, tyrosinase, EPCAM, CEA, Igf-I receptor, EphB2, mesothelin, Cadherin17, CD32b, EGFRvIII, GPNMB, GPR64, HER3, LRP6, LYPD8, NKG2D, SLC34A2, SLC39A6, SLITRK6, or TACSTD2.

[0964] 279. The TBM of embodiment 278, wherein the TAA is CD22.

[0965] 280. The TBM of embodiment 278, wherein the TAA is CS1.

[0966] 281. The TBM of embodiment 278, wherein the TAA is CD33.

[0967] 282. The TBM of embodiment 278, wherein the TAA is GD2.

[0968] 283. The TBM of embodiment 278, wherein the TAA is BCMA.

[0969] 284. The TBM of embodiment 278, wherein the TAA is Tn.

[0970] 285. The TBM of embodiment 278, wherein the TAA is PSMA.

[0971] 286. The TBM of embodiment 278, wherein the TAA is ROR1.

[0972] 287. The TBM of embodiment 278, wherein the TAA is FLT3.

[0973] 288. The TBM of embodiment 278, wherein the TAA is TAAG72.

[0974] 289. The TBM of embodiment 278, wherein the TAA is FAP.

[0975] 290. The TBM of embodiment 278, wherein the TAA is CD38.

[0976] 291. The TBM of embodiment 278, wherein the TAA is CD44v6.

[0977] 292. The TBM of embodiment 278, wherein the TAA is CEA.

[0978] 293. The TBM of embodiment 278, wherein the TAA is EPCAM.

[0979] 294. The TBM of embodiment 278, wherein the TAA is PRSS21.

[0980] 295. The TBM of embodiment 278, wherein the TAA is B7H3.

[0981] 296. The TBM of embodiment 278, wherein the TAA is KIT.

[0982] 297. The TBM of embodiment 278, wherein the TAA is IL-13Ra2.

[0983] 298. The TBM of embodiment 278, wherein the TAA is CD30.

[0984] 299. The TBM of embodiment 278, wherein the TAA is GD3.

[0985] 300. The TBM of embodiment 278, wherein the TAA is CD171.

[0986] 301. The TBM of 278, wherein the TAA is IL-11Ra.

[0987] 302. The TBM of embodiment 278, wherein the TAA is PSCA.

[0988] 303. The TBM of embodiment 278, wherein the TAA is VEGFR2.

[0989] 304. The TBM of embodiment 278, wherein the TAA is LewisY.

[0990] 305. The TBM of embodiment 278, wherein the TAA is CD24.

[0991] 306. The TBM of embodiment 278, wherein the TAA is PDGFR-beta.

[0992] 307. The TBM of embodiment 278, wherein the TAA is SSEA-4.

[0993] 308. The TBM of embodiment 278, wherein the TAA is CD20.

[0994] 309. The TBM of embodiment 278, wherein the TAA is folate receptor alpha.

[0995] 310. The TBM of embodiment 278, wherein the TAA is ERBB2.

[0996] 311. The TBM of embodiment 278, wherein the TAA is MUC1.

[0997] 312. The TBM of embodiment 278, wherein the TAA is EGFR.

[0998] 313. The TBM of embodiment 278, wherein the TAA is NCAM.

[0999] 314. The TBM of embodiment 278, wherein the TAA is ephrin B2

[1000] 315. The TBM of embodiment 278, wherein the TAA is IGF-I receptor.

[1001] 316. The TBM of embodiment 278, wherein the TAA is CAIX.

[1002] 317. The TBM of embodiment 278, wherein the TAA is LMP2.

[1003] 318. The TBM of embodiment 278, wherein the TAA is gp100.

[1004] 319. The TBM of embodiment 278, wherein the TAA is tyrosinase.

[1005] 320. The TBM of embodiment 278, wherein the TAA is ephA2.

[1006] 321. The TBM of embodiment 278, wherein the TAA is mesothelin.

[1007] 322. The TBM of embodiment 278, wherein the TAA is ALK.

[1008] 323. The TBM of embodiment 278, wherein the TAA is CD19.

[1009] 324. The TBM of embodiment 278, wherein the TAA is CD97.

[1010] 325. The TBM of embodiment 278, wherein the TAA is CLDN6.

[1011] 326. The TBM of embodiment 278, wherein the TAA is EGFRvIII.

[1012] 327. The TBM of embodiment 278, wherein the TAA is folate receptor beta.

[1013] 328. The TBM of embodiment 278, wherein the TAA is GloboH.

[1014] 329. The TBM of embodiment 278, wherein the TAA is GPRC5D.

[1015] 330. The TBM of embodiment 278, wherein the TAA is HMWMAA.

[1016] 331. The TBM of embodiment 278, wherein the TAA is LRP6.

[1017] 332. The TBM of embodiment 278, wherein the TAA is NY-BR-1.

[1018] 333. The TBM of embodiment 278, wherein the TAA is PLAC1.

[1019] 334. The TBM of embodiment 278, wherein the TAA is polysialic acid.

[1020] 335. The TBM of embodiment 278, wherein the TAA is TEM1/CD248.

[1021] 336. The TBM of embodiment 278, wherein the TAA is TSHR.

[1022] 337. The TBM of embodiment 278, wherein the TAA is CD19.

[1023] 338. The TBM of embodiment 278, wherein the TAA is Her2.

[1024] 339. The TBM of embodiment of any one of embodiments 31 to 338, wherein ABM1 is an antibody, an antibody fragment, an scFv, a dsFv, a Fv, a Fab, an scFab, a (Fab′)2, a single domain antibody (SDAB), a VH or VL domain, or a camelid VHH domain.

[1025] 340. The TBM of embodiment 339, wherein ABM1 is an scFv.

[1026] 341. The TBM of embodiment of embodiment 339, wherein ABM1 is a Fab.

[1027] 342. The TBM of any one of embodiments 1 to 341, wherein ABM2 is an antibody, an antibody fragment, an scFv, a dsFv, a Fv, a Fab, an scFab, a (Fab′)2, a single domain antibody (SDAB), a VH or VL domain, or a camelid VHH domain.

[1028] 343. The TBM of embodiment 342, wherein ABM2 is an scFv.

[1029] 344. The TBM of embodiment 343, wherein the scFv comprises the amino acid sequence of the scFV binding domain designated as CD3-21.

[1030] 345. The TBM of any of embodiment 342, wherein ABM2 is a Fab.

[1031] 346. The TBM of any one of embodiments 1 to 345, except when depending from any one of embodiments 277 to 338, wherein ABM3 is an antibody, an antibody fragment, an scFv, a dsFv, a Fv, a Fab, an scFab, a (Fab′)2, a single domain antibody (SDAB), a VH or VL domain, or a camelid VHH domain.

[1032] 347. The TBM of embodiment 346, wherein ABM3 is an scFv.

[1033] 348. The TBM of embodiment 347, wherein the TAA is CD19 and the scFv comprises the amino acid sequence of CD19-scFv1 as set forth in Table 13.

[1034] 349. The TBM of embodiment 347, wherein the TAA is CD19 and the scFv comprises the amino acid sequence of CD19-scFv2 as set forth in Table 13.

[1035] 350. The TBM of embodiment 347, wherein the TAA is CD19 and the scFv comprises the amino acid sequence of CD19-scFv3 as set forth in Table 13.

[1036] 351. The TBM of embodiment 347, wherein the TAA is CD19 and the scFv comprises the amino acid sequence of CD19-scFv4 as set forth in Table 13.

[1037] 352. The TBM of embodiment 347, wherein the TAA is CD19 and the scFv comprises the amino acid sequence of CD19-scFv5 as set forth in Table 13.

[1038] 353. The TBM of embodiment 347, wherein the TAA is CD19 and the scFv comprises the amino acid sequence of CD19-scFv6 as set forth in Table 13.

[1039] 354. The TBM of embodiment 347, wherein the TAA is CD19 and the scFv comprises the amino acid sequence of CD19-scFv7 as set forth in Table 13.

[1040] 355. The TBM of embodiment 347, wherein the TAA is CD19 and the scFv comprises the amino acid sequence of CD19-scFv8 as set forth in Table 13.

[1041] 356. The TBM of embodiment 347, wherein the TAA is CD19 and the scFv comprises the amino acid sequence of CD19-scFv9 as set forth in Table 13.

[1042] 357. The TBM of embodiment 347, wherein the TAA is CD19 and the scFv comprises the amino acid sequence of CD19-scFv10 as set forth in Table 13.

[1043] 358. The TBM of embodiment 347, wherein the TAA is CD19 and the scFv comprises the amino acid sequence of CD19-scFv11 as set forth in Table 13.

[1044] 359. The TBM of embodiment 347, wherein the TAA is CD19 and the scFv comprises the amino acid sequence of CD19-scFv12 as set forth in Table 13.

[1045] 360. The TBM of embodiment 347, wherein the TAA is BCMA and the scFv comprises the amino acid sequence of scFv corresponding to BCMA-1 as set forth in Table 12A.

[1046] 361. The TBM of embodiment 347, wherein the TAA is BCMA and the scFv comprises the amino acid sequence of scFv corresponding to BCMA-2 as set forth in Table 12A.

[1047] 362. The TBM of embodiment 347, wherein the TAA is BCMA and the scFv comprises the amino acid sequence of scFv corresponding to BCMA-3 as set forth in Table 12A.

[1048] 363. The TBM of embodiment 347, wherein the TAA is BCMA and the scFv comprises the amino acid sequence of scFv corresponding to BCMA-4 as set forth in Table 12A.

[1049] 364. The TBM of embodiment 347, wherein the TAA is BCMA and the scFv comprises the amino acid sequence of scFv corresponding to BCMA-5 as set forth in Table 12A.

[1050] 365. The TBM of embodiment 347, wherein the TAA is BCMA and the scFv comprises the amino acid sequence of scFv corresponding to BCMA-6 as set forth in Table 12A.

[1051] 366. The TBM of embodiment 347, wherein the TAA is BCMA and the scFv comprises the amino acid sequence of scFv corresponding to BCMA-7 as set forth in Table 12A.

[1052] 367. The TBM of embodiment 347, wherein the TAA is BCMA and the scFv comprises the amino acid sequence of scFv corresponding to BCMA-8 as set forth in Table 12A.

[1053] 368. The TBM of embodiment 347, wherein the TAA is BCMA and the scFv comprises the amino acid sequence of scFv corresponding to BCMA-9 as set forth in Table 12A.

[1054] 369. The TBM of embodiment 347, wherein the TAA is BCMA and the scFv comprises the amino acid sequence of scFv corresponding to BCMA-10 as set forth in Table 12A.

[1055] 370. The TBM of embodiment 347, wherein the TAA is BCMA and the scFv comprises the amino acid sequence of scFv corresponding to BCMA-11 as set forth in Table 12A.

[1056] 371. The TBM of embodiment 347, wherein the TAA is BCMA and the scFv comprises the amino acid sequence of scFv corresponding to BCMA-12 as set forth in Table 12A.

[1057] 372. The TBM of embodiment 347, wherein the TAA is BCMA and the scFv comprises the amino acid sequence of scFv corresponding to BCMA-13 as set forth in Table 12A.

[1058] 373. The TBM of embodiment 347, wherein the TAA is BCMA and the scFv comprises the amino acid sequence of scFv corresponding to BCMA-14 as set forth in Table 12A.

[1059] 374. The TBM of embodiment 347, wherein the TAA is BCMA and the scFv comprises the amino acid sequence of scFv corresponding to BCMA-15 as set forth in Table 12A.

[1060] 375. The TBM of embodiment 347, wherein the TAA is BCMA and the scFv comprises the amino acid sequence of scFv corresponding to BCMA-16 as set forth in Table 12A.

[1061] 376. The TBM of embodiment 347, wherein the TAA is BCMA and the scFv comprises the amino acid sequence of scFv corresponding to BCMA-17 as set forth in Table 12A.

[1062] 377. The TBM of embodiment 347, wherein the TAA is BCMA and the scFv comprises the amino acid sequence of scFv corresponding to BCMA-18 as set forth in Table 12A.

[1063] 378. The TBM of embodiment 347, wherein the TAA is BCMA and the scFv comprises the amino acid sequence of scFv corresponding to BCMA-19 as set forth in Table 12A.

[1064] 379. The TBM of embodiment 347, wherein the TAA is BCMA and the scFv comprises the amino acid sequence of scFv corresponding to BCMA-20 as set forth in Table 12A.

[1065] 380. The TBM of embodiment 347, wherein the TAA is BCMA and the scFv comprises the amino acid sequence of scFv corresponding to BCMA-21 as set forth in Table 12A.

[1066] 381. The TBM of embodiment 347, wherein the TAA is BCMA and the scFv comprises the amino acid sequence of scFv corresponding to BCMA-22 as set forth in Table 12A.

[1067] 382. The TBM of embodiment 347, wherein the TAA is BCMA and the scFv comprises the amino acid sequence of scFv corresponding to BCMA-23 as set forth in Table 12A.

[1068] 383. The TBM of embodiment 347, wherein the TAA is BCMA and the scFv comprises the amino acid sequence of scFv corresponding to BCMA-24 as set forth in Table 12A.

[1069] 384. The TBM of embodiment 347, wherein the TAA is BCMA and the scFv comprises the amino acid sequence of scFv corresponding to BCMA-25 as set forth in Table 12A.

[1070] 385. The TBM of embodiment 347, wherein the TAA is BCMA and the scFv comprises the amino acid sequence of scFv corresponding to BCMA-26 as set forth in Table 12A.

[1071] 386. The TBM of embodiment 347, wherein the TAA is BCMA and the scFv comprises the amino acid sequence of scFv corresponding to BCMA-27 as set forth in Table 12A.

[1072] 387. The TBM of embodiment 347, wherein the TAA is BCMA and the scFv comprises the amino acid sequence of scFv corresponding to BCMA-28 as set forth in Table 12A.

[1073] 388. The TBM of embodiment 347, wherein the TAA is BCMA and the scFv comprises the amino acid sequence of scFv corresponding to BCMA-29 as set forth in Table 12A.

[1074] 389. The TBM of embodiment 347, wherein the TAA is BCMA and the scFv comprises the amino acid sequence of scFv corresponding to BCMA-30 as set forth in Table 12A.

[1075] 390. The TBM of embodiment 347, wherein the TAA is BCMA and the scFv comprises the amino acid sequence of scFv corresponding to BCMA-31 as set forth in Table 12A.

[1076] 391. The TBM of embodiment 347, wherein the TAA is BCMA and the scFv comprises the amino acid sequence of scFv corresponding to BCMA-32 as set forth in Table 12A.

[1077] 392. The TBM of embodiment 347, wherein the TAA is BCMA and the scFv comprises the amino acid sequence of scFv corresponding to BCMA-33 as set forth in Table 12A.

[1078] 393. The TBM of embodiment 347, wherein the TAA is BCMA and the scFv comprises the amino acid sequence of scFv corresponding to BCMA-34 as set forth in Table 12A.

[1079] 394. The TBM of embodiment 347, wherein the TAA is BCMA and the scFv comprises the amino acid sequence of scFv corresponding to BCMA-35 as set forth in Table 12A.

[1080] 395. The TBM of embodiment 347, wherein the TAA is BCMA and the scFv comprises the amino acid sequence of scFv corresponding to BCMA-36 as set forth in Table 12A.

[1081] 396. The TBM of embodiment 347, wherein the TAA is BCMA and the scFv comprises the amino acid sequence of scFv corresponding to BCMA-37 as set forth in Table 12A.

[1082] 397. The TBM of embodiment 347, wherein the TAA is BCMA and the scFv comprises the amino acid sequence of scFv corresponding to BCMA-38 as set forth in Table 12A.

[1083] 398. The TBM of embodiment 347, wherein the TAA is BCMA and the scFv comprises the amino acid sequence of scFv corresponding to BCMA-39 as set forth in Table 12A.

[1084] 399. The TBM of embodiment 347, wherein the TAA is BCMA and the scFv comprises the amino acid sequence of scFv corresponding to BCMA-40 as set forth in Table 12A.

[1085] 400. The TBM of embodiment 346, wherein ABM3 is a Fab. 401. The TBM of any one of embodiments 1 to 400, which comprises:
[1086] (a) a first monomer or half antibody comprising:
   [1087] (i) a first chain comprising a first variant Fc region and a first heavy chain variable domain;
   [1088] (ii) a first scFv domain; and
[1089] (b) a second monomer or half antibody comprising:
   [1090] (i) a second chain comprising a second variant Fc region and first heavy chain variable domain;
   [1091] (ii) a second scFv domain; and
[1092] (c) a third chain comprising a light chain constant domain and a light chain variable domain; wherein:
   [1093] (1) the first and second variant Fc regions form a heterodimer,
   [1094] (2) the first heavy chain variable domain and the light chain variable domain form ABM1, provided that TBM1 is not a CD58 moiety,
   [1095] (3) the first scFv domain forms ABM2, and
   [1096] (4) the second scFv domain forms ABM3.

[1097] 402. The TBM of any one of embodiments 1 to 400, which comprises:
[1098] (a) a first monomer or half antibody comprising:
   [1099] (i) a first chain comprising a first variant Fc region and a first heavy chain variable domain;
   [1100] (ii) a first scFv domain; and
[1101] (b) a second monomer or half antibody comprising:
   [1102] (i) a second chain comprising a second variant Fc region and first heavy chain variable domain;
   [1103] (ii) a second scFv domain; and
[1104] (c) a third chain comprising a light chain constant domain and a light chain variable domain; wherein:
   [1105] (1) the first and second variant Fc regions form a heterodimer,
   [1106] (2) the first heavy chain variable domain and the light chain variable domain form ABM1, provided that TBM1 is not a CD58 moiety,
   [1107] (3) the first scFv domain forms ABM3, and
   [1108] (4) the second scFv domain forms ABM2.

[1109] 403. The TBM of any one of embodiments 1 to 400, which comprises:
[1110] (a) a first monomer or half antibody comprising:
   [1111] (i) a first chain comprising a first variant Fc region and a first heavy chain variable domain;
   [1112] (ii) a first scFv domain or CD58 moiety; and
[1113] (b) a second monomer or half antibody comprising:
   [1114] (i) a second chain comprising a second variant Fc region and first heavy chain variable domain;
   [1115] (ii) a second scFv domain; and
[1116] (c) a third chain comprising a light chain constant domain and a light chain variable domain; wherein
   [1117] (1) the first and second variant Fc regions form a heterodimer,
   [1118] (2) the first heavy chain variable domain and the light chain variable domain form ABM2,
   [1119] (3) the first scFv domain or CD58 moiety forms ABM1, and
   [1120] (4) the second scFv domain forms ABM3.

[1121] 404. The TBM of any one of embodiments 1 to 400, which comprises:
[1122] (a) a first monomer or half antibody comprising:
   [1123] (i) a first chain comprising a first variant Fc region and a first heavy chain variable domain;
   [1124] (ii) a first scFv domain; and
[1125] (b) a second monomer or half antibody comprising:
   [1126] (i) a second chain comprising a second variant Fc region and first heavy chain variable domain;
   [1127] (ii) a second scFv domain or a CD58 moiety; and
[1128] (c) a third chain comprising a light chain constant domain and a light chain variable domain; wherein
   [1129] (1) the first and second variant Fc regions form a heterodimer,
   [1130] (2) the first heavy chain variable domain and the light chain variable domain form ABM2,
   [1131] (3) the first scFv domain forms ABM3, and
   [1132] (4) the second scFv domain or CD58 moiety forms ABM1.

[1133] 405. The TBM of any one of embodiments 1 to 400, which comprises:
[1134] (a) a first monomer or half antibody comprising:
   [1135] (i) a first chain comprising a first variant Fc region and a first heavy chain variable domain;
   [1136] (ii) a first scFv domain; and
[1137] (b) a second monomer or half antibody comprising:
   [1138] (i) a second chain comprising a second variant Fc region and first heavy chain variable domain;
   [1139] (ii) a second scFv domain or a CD58 moiety; and
[1140] a third chain comprising a light chain constant domain and a light chain variable domain; wherein:
   [1141] (1) the first and second variant Fc regions form a heterodimer,
   [1142] (2) the first heavy chain variable domain and the light chain variable domain form ABM3,
   [1143] (3) the first scFv domain forms ABM2, and
   [1144] (4) the second scFv domain or CD58 moiety forms ABM1.

[1145] 406. The TBM of any one of embodiments 1 to 400, which comprises:
[1146] (a) a first monomer or half antibody comprising:
   [1147] (i) a first chain comprising a first variant Fc region and a first heavy chain variable domain;
   [1148] (ii) a first scFv domain or CD58 moiety; and
[1149] (b) a second monomer or half antibody comprising:
   [1150] (i) a second chain comprising a second variant Fc region and first heavy chain variable domain;

[1151] (ii) a second scFv domain; and
[1152] (c) a third chain comprising a light chain constant domain and a light chain variable domain; wherein
   [1153] (1) the first and second variant Fc regions form a heterodimer,
   [1154] (2) the first heavy chain variable domain and the light chain variable domain form ABM3,
   [1155] (3) the first scFv domain or CD58 moiety forms ABM1, and
   [1156] (4) the second scFv domain forms ABM2.

[1157] 407. The TBM of any one of embodiments 401 to 406, wherein the first and second variant Fc regions comprise the amino acid substitutions S364K/E357Q:L368D/K370S.

[1158] 408. The TBM of any one of embodiments 401 to 406, wherein the first and second variant Fc regions comprise the amino acid substitutions L368D/K370S:S364.

[1159] 409. The TBM of any one of embodiments 401 to 406, wherein the first and second variant Fc regions comprise the amino acid substitutions L368E/K370S:S364K.

[1160] 410. The TBM of any one of embodiments 401 to 406, wherein the first and second variant Fc regions comprise the amino acid substitutions T411T/E360E/Q362E:D401K.

[1161] 411. The TBM of any one of embodiments 401 to 406, wherein the first and second variant Fc regions comprise the amino acid substitutions L368D 370S:S364/E357L.

[1162] 412. The TBM of any one of embodiments 401 to 406, wherein the first and second variant Fc regions comprise the amino acid substitutions 370S:S364K/E357Q.

[1163] 413. The TBM of any one of embodiments 401 to 406, wherein the first and second variant Fc regions comprise the amino acid substitutions of any of the steric variants listed in FIG. 4 of WO 2014/110601 (reproduced in Table 2).

[1164] 414. The TBM of any one of embodiments 401 to 406, wherein the first and second variant Fc regions comprise the amino acid substitutions of any of the variants listed in FIG. 5 of WO 2014/110601 (reproduced in Table 2).

[1165] 415. The TBM of any one of embodiments 401 to 406, wherein the first and second variant Fc regions comprise the amino acid substitutions of any of the variants listed in FIG. 6 of WO 2014/110601 (reproduced in Table 2).

[1166] 416. The TBM of any one of embodiments 401 to 415, wherein at least one of the monomers or half antibodies further comprises pI variant substitutions.

[1167] 417. The TBM of embodiment 416 wherein said pI variant substitutions are selected from Table 2.

[1168] 418. The TBM of embodiment 417, wherein the pI variant substitutions comprise the substitutions present in pI_ISO(−).

[1169] 419. The TBM of embodiment 417, wherein the pI variant substitutions comprise the substitutions present in pI_(−)_isosteric_A.

[1170] 420. The TBM of embodiment 417, wherein the pI variant substitutions comprise the substitutions present in pI_(−)_isosteric_B.

[1171] 421. The TBM of embodiment 417, wherein the pI variant substitutions comprise the substitutions present in PI_ISO(+RR).

[1172] 422. The TBM of embodiment 417, wherein the pI variant substitutions comprise the substitutions present in pI_ISO(+).

[1173] 423. The TBM of embodiment 417, wherein the pI variant substitutions comprise the substitutions present in pI_(+)_isosteric_A.

[1174] 424. The TBM of embodiment 417, wherein the pI variant substitutions comprise the substitutions present in pI_(+)_isosteric_B.

[1175] 425. The TBM of embodiment 417, wherein the pI variant substitutions comprise the substitutions present in pI_(+)_isosteric_E269Q/E272Q.

[1176] 426. The TBM of embodiment 417, wherein the pI variant substitutions comprise the substitutions present in pI_(+)_isosteric_E269Q/E283Q.

[1177] 427. The TBM of embodiment 417, wherein the pI variant substitutions comprise the substitutions present in pI_(+)_isosteric_E2720/E283Q.

[1178] 428. The TBM of embodiment 417, wherein the pI variant substitutions comprise the substitutions present in pI_(+)_isosteric_E269Q.

[1179] 429. The TBM of embodiment any of embodiments 401 to 428, wherein said first and second scFv domains are covalently attached to the C-terminus of said first and second chains, respectively.

[1180] 430. The TBM of embodiment any of embodiments 401 to 428, wherein said first and second scFv domains are covalently attached to the N-terminus of said first and second chains, respectively.

[1181] 431. The TBM of embodiment any of embodiments 401 to 428, wherein each of the scFv domains is attached between said Fc region and the CH domain of said chain.

[1182] 432. The TBM of embodiment any of embodiments 401 to 431, wherein the scFv domains are covalently attached using one or more domain linkers.

[1183] 433. The TBM of embodiment any of embodiments 401 to 432, wherein the scFv domains comprise at least one scFv linker.

[1184] 434. The TBM of embodiment 433, wherein at least one scFv linker is charged.

[1185] 435. The TBM of embodiment 434, wherein the charged linker is selected from L1 through L54.

[1186] 436. The TBM of embodiment any of embodiments 401 to 435, wherein the first and/or second Fc region further comprises one or more amino acid substitution(s) selected from 434A, 434S, 428L, 308F, 2591, 428L/434S, 2591/308F, 4361/428L, 4361 or V/434S, 436V/428L, 252Y, 252Y/254T/256E, 2591/308F/428L, 236A, 239D, 239E, 332E, 332D, 239D/332E, 267D, 267E, 328F, 267E/328F, 236A/332E, 239D/332E/330Y, 239D, 332E/330L, 236R, 328R, 236R/328R, 236N/267E, 243L, 298A and 299T.

[1187] 437. The TBM of embodiment any of embodiments 401 to 435, wherein the first and/or second Fc region further comprises one or more amino acid substitution comprises the amino acid substitution 434A, 434S or 434V.

[1188] 438. The TBM of embodiment 437, wherein the first and/or second Fc region further comprises one or more amino acid substitution comprises the amino acid substitution 428L.

[1189] 439. The TBM of any one of embodiments 437 to 438, wherein the first and/or second Fc region further comprises one or more amino acid substitution comprises the amino acid substitution 308F.

[1190] 440. The TBM of any one of embodiments 437 to 439, wherein the first and/or second Fc region further comprises one or more amino acid substitution comprises the amino acid substitution 2591.

[1191] 441. The TBM of any one of embodiments 437 to 440, wherein the first and/or second Fc region further comprises one or more amino acid substitution comprises the amino acid substitution 4361.

[1192] 442. The TBM of any one of embodiments 437 to 441, wherein the first and/or second Fc region further comprises one or more amino acid substitution comprises the amino acid substitution 252Y.

[1193] 443. The TBM of any one of embodiments 437 to 442, wherein the first and/or second Fc region further comprises one or more amino acid substitution comprises the amino acid substitution 254T.

[1194] 444. The TBM of any one of embodiments 437 to 443, wherein the first and/or second Fc region further comprises one or more amino acid substitution comprises the amino acid substitution 256E.

[1195] 445. The TBM of any one of embodiments 437 to 444, wherein the first and/or second Fc region further comprises one or more amino acid substitution comprises the amino acid substitution 239D or 239E.

[1196] 446. The TBM of any one of embodiments 437 to 445, wherein the first and/or second Fc region further comprises one or more amino acid substitution comprises the amino acid substitution 332E or 332D.

[1197] 447. The TBM of any one of embodiments 437 to 446, wherein the first and/or second Fc region further comprises one or more amino acid substitution comprises the amino acid substitution 267D or 267E.

[1198] 448. The TBM of any one of embodiments 437 to 447, wherein the first and/or second Fc region further comprises one or more amino acid substitution comprises the amino acid substitution 330L.

[1199] 449. The TBM of any one of embodiments 437 to 448, wherein the first and/or second Fc region further comprises one or more amino acid substitution comprises the amino acid substitution 236R or 236N.

[1200] 450. The TBM of any one of embodiments 437 to 449, wherein the first and/or second Fc region further comprises one or more amino acid substitution comprises the amino acid substitution 328R.

[1201] 451. The TBM of any one of embodiments 437 to 450, wherein the first and/or second Fc region further comprises one or more amino acid substitution comprises the amino acid substitution 243L.

[1202] 452. The TBM of any one of embodiments 437 to 451, wherein the first and/or second Fc region further comprises one or more amino acid substitution comprises the amino acid substitution 298A.

[1203] 453. The TBM of any one of embodiments 437 to 452, wherein the first and/or second Fc region further comprises one or more amino acid substitution comprises the amino acid substitution 299T.

[1204] 454. The TBM of embodiment 1, which comprises the amino acid sequences of trispecific AB1 set forth in Table 15.

[1205] 455. The TBM of embodiment 1, which comprises the amino acid sequences of AB2-2 set forth in Table 20.

[1206] 456. The TBM of embodiment 1, which comprises the amino acid sequences of AB2-3 set forth in Table 20.

[1207] 457. The TBM of embodiment 1, which comprises the amino acid sequences of AB3-2 set forth in Table 21.

[1208] 458. The TBM of embodiment 1, which comprises the amino acid sequences of AB3-3 set forth in Table 21.

[1209] 459. The TBM of embodiment 1, which comprises the amino acid sequences of AB3-4 set forth in Table 21.

[1210] 460. The TBM of embodiment 1, which comprises the amino acid sequences of AB3-5 set forth in Table 21.

[1211] 461. The TBM of embodiment 1, which comprises the amino acid sequences of AB4-2 set forth in Table 22.

[1212] 462. The TBM of embodiment 1, which comprises the amino acid sequences of AB4-3 set forth in Table 22.

[1213] 463. The TBM of embodiment 1, which comprises the amino acid sequences of the TBM set forth in Table 23A.

[1214] 464. The TBM of embodiment 1, which comprises the amino acid sequences of the TBM set forth in Table 23B.

[1215] 465. The TBM of embodiment 1, which comprises the amino acid sequences of the TBM set forth in Table 24.

[1216] 466. The TBM of embodiment 1, which comprises the amino acid sequences of the TBM set forth in Table 25.

[1217] 467. The TBM of embodiment 1, which comprises the amino acid sequences of the TBM set forth in Table 26.

[1218] 468. The TBM of any one of embodiments 1 to 467, which has been recombinantly produced, optionally in a mammalian host cell, which is optionally selected from Vero cells, HeLa cells, COS cells, CHO cells, HEK293 cells, BHK cells and MDCKII cells.

[1219] 469. A conjugate comprising the TBM of any one of embodiments 1 to 468 and an agent.

[1220] 470. The conjugate of embodiment 469, wherein the agent is a therapeutic agent, a diagnostic agent, a masking moiety, a cleavable moiety, or any combination thereof.

[1221] 471. The conjugate of embodiment 470, wherein the agent is any of the agents described in Section 4.9.

[1222] 472. The conjugate of embodiment 470, wherein the agent is any of the agents described in Section 4.9.1.

[1223] 473. The conjugate of any one of embodiments 469 to 472, wherein the TBM is conjugated to a radionuclide.

[1224] 474. The conjugate of any one of embodiments 469 to 472, wherein the TBM is conjugated to an alkylating agent.

[1225] 475. The conjugate of any one of embodiments 469, wherein the TBM is conjugated to a topoisomerase inhibitor, which is optionally a topoisomerase I inhibitor or a topoisomerase II inhibitor.

[1226] 476. The conjugate of any one of embodiments 469 to 472, wherein the TBM is conjugated to a DNA damaging agent.

[1227] 477. The conjugate of any one of embodiments 469 to 472, wherein the TBM is conjugated to a DNA intercalating agent, optionally a groove binding agent such as a minor groove binding agent.

[1228] 478. The conjugate of any one of embodiments 469 to 472, wherein the TBM is conjugated to a RNA/DNA antimetabolite.

[1229] 479. The conjugate of any one of embodiments 469 to 472, wherein the TBM is conjugated to a kinase inhibitor.

[1230] 480. The conjugate of any one of embodiments 469 to 472, wherein the TBM is conjugated to a protein synthesis inhibitor.

[1231] 481. The conjugate of any one of embodiments 469 to 472, wherein the TBM is conjugated to a histone deacetylase (HDAC) inhibitor.

[1232] 482. The conjugate of any one of embodiments 469 to 472, wherein the TBM is conjugated to a mitochondrial. Inhibitor, which is optionally an inhibitor of a phosphoryl transfer reaction in mitochondria.

[1233] 483. The conjugate of any one of embodiments 469 to 472, wherein the TBM is conjugated to an antimitotic agent.

[1234] 484. The conjugate of any one of embodiments 469 to 472, wherein the TBM is conjugated to a maytansinoid.

[1235] 485. The conjugate of any one of embodiments 469 to 472, wherein the TBM is conjugated to a kinesin inhibitor.

[1236] 486. The conjugate of any one of embodiments 469 to 472, wherein the TBM is conjugated to a kinesin-like protein KIF11 inhibitor.

[1237] 487. The conjugate of any one of embodiments 469 to 472, wherein the TBM is conjugated to a V-ATPase (vacuolar-type H+-ATPase) inhibitor.

[1238] 488. The conjugate of any one of embodiments 469 to 472, wherein the TBM is conjugated to a pro-apoptotic agent.

[1239] 489. The conjugate of any one of embodiments 469 to 472, wherein the TBM is conjugated to a Bcl2 (B-cell lymphoma 2) inhibitor.

[1240] 490. The conjugate of any one of embodiments 469 to 472, wherein the TBM is conjugated to an MCL1 (myeloid cell leukemia 1) inhibitor.

[1241] 491. The conjugate of any one of embodiments 469 to 472, wherein the TBM is conjugated to a HSP90 (heat shock protein 90) inhibitor.

[1242] 492. The conjugate of any one of embodiments 469 to 472, wherein the TBM is conjugated to an IAP (inhibitor of apoptosis) inhibitor.

[1243] 493. The conjugate of any one of embodiments 469 to 472, wherein the TBM is conjugated to an mTOR (mechanistic target of rapamycin) inhibitor.

[1244] 494. The conjugate of any one of embodiments 469 to 472, wherein the TBM is conjugated to a microtubule stabilizer.

[1245] 495. The conjugate of any one of embodiments 469 to 472, wherein the TBM is conjugated to a microtubule destabilizer.

[1246] 496. The conjugate of any one of embodiments 469 to 472, wherein the TBM is conjugated to an auristatin.

[1247] 497. The conjugate of any one of embodiments 469 to 472, wherein the TBM is conjugated to a dolastatin.

[1248] 498. The conjugate of any one of embodiments 469 to 472, wherein the TBM is conjugated to a MetAP (methionine aminopeptidase).

[1249] 499. The conjugate of any one of embodiments 469 to 472, wherein the TBM is conjugated to a CRM1 (chromosomal maintenance 1) inhibitor.

[1250] 500. The conjugate of any one of embodiments 469 to 472, wherein the TBM is conjugated to a DPPIV (dipeptidyl peptidase IV) inhibitor.

[1251] 501. The conjugate of any one of embodiments 469 to 472, wherein the TBM is conjugated to a proteasome inhibitor.

[1252] 502. The conjugate of any one of embodiments 469 to 472, wherein the TBM is conjugated to a protein synthesis inhibitor.

[1253] 503. The conjugate of any one of embodiments 469 to 472, wherein the TBM is conjugated to a CDK2 (cyclin-dependent kinase 2) inhibitor.

[1254] 504. The conjugate of any one of embodiments 469 to 472, wherein the TBM is conjugated to a CDK9 (cyclin-dependent kinase 9) inhibitor.

[1255] 505. The conjugate of any one of embodiments 469 to 472, wherein the TBM is conjugated to a RNA polymerase inhibitor.

[1256] 506. The conjugate of any one of embodiments 469 to 472, wherein the TBM is conjugated to a DHFR (dihydrofolate reductase) inhibitor.

[1257] 507. The conjugate of any one of embodiments 469 to 506, wherein the agent is attached to the TBM with a linker, which is optionally a cleavable linker or a non-cleavabe linker, e.g., a linker as described in Section 4.9.2.

[1258] 508. A preparation of TBMs comprising a plurality of TBM molecules according to any one of embodiments 1 to 468 or a plurality of conjugate molecules according to any one of embodiments 469 to 507, optionally wherein the plurality comprises at least 100, at least 1,000, at least 10,000, or at least 100,000 TBM molecules or conjugate molecules.

[1259] 509. The preparation of embodiment 508, wherein at least 50% of the trispecific molecules in the preparation have the same primary amino acid sequence.

[1260] 510. The preparation of embodiment 508, wherein at least 60% of the trispecific molecules in the preparation have the same primary amino acid sequence.

[1261] 511. The preparation of embodiment 508, wherein at least 70% of the trispecific molecules in the preparation have the same primary amino acid sequence.

[1262] 512. The preparation of embodiment 508, wherein at least 80% of the trispecific molecules in the preparation have the same primary amino acid sequence.

[1263] 513. The preparation of embodiment 508, wherein at least 90% of the trispecific molecules in the preparation have the same primary amino acid sequence.

[1264] 514. The preparation of embodiment 508, wherein at least 95% of the trispecific molecules in the preparation have the same primary amino acid sequence.

[1265] 515. The preparation of embodiment 508, wherein at least 97% of the trispecific molecules in the preparation have the same primary amino acid sequence.

[1266] 516. The preparation of embodiment 508, wherein at least 98% of the trispecific molecules in the preparation have the same primary amino acid sequence.

[1267] 517. The preparation of embodiment 508, wherein at least 99% of the trispecific molecules in the preparation have the same primary amino acid sequence.

[1268] 518. The preparation of embodiment 508, wherein 50% to 95% of the trispecific molecules in the preparation have the same primary amino acid sequence.

[1269] 519. The preparation of embodiment 508, wherein 50% to 80% of the trispecific molecules in the preparation have the same primary amino acid sequence.

[1270] 520. The preparation of embodiment 508, wherein 50% to 70% of the trispecific molecules in the preparation have the same primary amino acid sequence.

[1271] 521. The preparation of embodiment 508, wherein 60% to 95% of the trispecific molecules in the preparation have the same primary amino acid sequence.

[1272] 522. The preparation of embodiment 508, wherein 60% to 80% of the trispecific molecules in the preparation have the same primary amino acid sequence.

[1273] 523. The preparation of embodiment 508, wherein 60% to 70% of the trispecific molecules in the preparation have the same primary amino acid sequence.

[1274] 524. The preparation of embodiment 508, wherein 70% to 95% of the trispecific molecules in the preparation have the same primary amino acid sequence.

[1275] 525. The preparation of embodiment 508, wherein 70% to 80% of the trispecific molecules in the preparation have the same primary amino acid sequence.

[1276] 526. The preparation of embodiment 508, wherein 80% to 95% of the trispecific molecules in the preparation have the same primary amino acid sequence.

[1277] 527. The preparation of embodiment 508, wherein 95% to 99% of the trispecific molecules in the preparation have the same primary amino acid sequence.

[1278] 528. The preparation of any one of embodiments 508 to 527, wherein at least 50% of the trispecific molecules in the preparation have the same interchain crosslinks.

[1279] 529. The preparation of any one of embodiments 508 to 527, wherein at least 60% of the trispecific molecules in the preparation have the same interchain crosslinks.

[1280] 530. The preparation of any one of embodiments 508 to 527, wherein at least 70% of the trispecific molecules in the preparation have the same interchain crosslinks.

[1281] 531. The preparation of any one of embodiments 508 to 527, wherein at least 80% of the trispecific molecules in the preparation have the same interchain crosslinks.

[1282] 532. The preparation of any one of embodiments 508 to 527, wherein at least 90% of the trispecific molecules in the preparation have the same interchain crosslinks.

[1283] 533. The preparation of any one of embodiments 508 to 527, wherein at least 95% of the trispecific molecules in the preparation have the same interchain crosslinks.

[1284] 534. The preparation of any one of embodiments 508 to 527, wherein at least 97% of the trispecific molecules in the preparation have the same interchain crosslinks.

[1285] 535. The preparation of any one of embodiments 508 to 527, wherein at least 98% of the trispecific molecules in the preparation have the same interchain crosslinks.

[1286] 536. The preparation of any one of embodiments 508 to 527, wherein at least 99% of the trispecific molecules in the preparation have the same interchain crosslinks.

[1287] 537. The preparation of any one of embodiments 508 to 527, wherein 50% to 95% of the trispecific molecules in the preparation have the same interchain crosslinks.

[1288] 538. The preparation of any one of embodiments 508 to 527, wherein 50% to 80% of the trispecific molecules in the preparation have the same interchain crosslinks.

[1289] 539. The preparation of any one of embodiments 508 to 527, wherein 50% to 70% of the trispecific molecules in the preparation have the same interchain crosslinks.

[1290] 540. The preparation of any one of embodiments 508 to 527, wherein 60% to 95% of the trispecific molecules in the preparation have the same interchain crosslinks.

[1291] 541. The preparation of any one of embodiments 508 to 527, wherein 60% to 80% of the trispecific molecules in the preparation have the same interchain crosslinks.

[1292] 542. The preparation of any one of embodiments 508 to 527, wherein 60% to 70% of the trispecific molecules in the preparation have the same interchain crosslinks.

[1293] 543. The preparation of any one of embodiments 508 to 527, wherein 70% to 95% of the trispecific molecules in the preparation have the same interchain crosslinks.

[1294] 544. The preparation of any one of embodiments 508 to 527, wherein 70% to 80% of the trispecific molecules in the preparation have the same interchain crosslinks.

[1295] 545. The preparation of any one of embodiments 508 to 527, wherein 80% to 95% of the trispecific molecules in the preparation have the same interchain crosslinks.

[1296] 546. The preparation of any one of embodiments 508 to 527, wherein 95% to 99% of the trispecific molecules in the preparation have the same interchain crosslinks.

[1297] 547. The preparation of any one of embodiments 508 to 546, wherein at least 50% of the trispecific molecules in the preparation have the same ABM1:ABM2:ABM3 ratio.

[1298] 548. The preparation of any one of embodiments 508 to 546, wherein at least 60% of the trispecific molecules in the preparation have the same ABM1:ABM2:ABM3 ratio.

[1299] 549. The preparation of any one of embodiments 508 to 546, wherein at least 70% of the trispecific molecules in the preparation have the same ABM1:ABM2:ABM3 ratio.

[1300] 550. The preparation of any one of embodiments 508 to 546, wherein at least 80% of the trispecific molecules in the preparation have the same ABM1:ABM2:ABM3 ratio.

[1301] 551. The preparation of any one of embodiments 508 to 546, wherein at least 90% of the trispecific molecules in the preparation have the same ABM1:ABM2:ABM3 ratio.

[1302] 552. The preparation of any one of embodiments 508 to 546, wherein at least 95% of the trispecific molecules in the preparation have the same ABM1:ABM2:ABM3 ratio.

[1303] 553. The preparation of any one of embodiments 508 to 546, wherein at least 97% of the trispecific molecules in the preparation have the same ABM1:ABM2:ABM3 ratio.

[1304] 554. The preparation of any one of embodiments 508 to 546, wherein at least 98% of the trispecific molecules in the preparation have the same ABM1:ABM2:ABM3 ratio.

[1305] 555. The preparation of any one of embodiments 508 to 546, wherein at least 99% of the trispecific molecules in the preparation have the same ABM1:ABM2:ABM3 ratio.

[1306] 556. The preparation of any one of embodiments 508 to 546, wherein 50% to 95% of the trispecific molecules in the preparation have the same ABM1:ABM2:ABM3 ratio.

[1307] 557. The preparation of any one of embodiments 508 to 546, wherein 50% to 80% of the trispecific molecules in the preparation have the same ABM1:ABM2:ABM3 ratio.

[1308] 558. The preparation of any one of embodiments 508 to 546, wherein 50% to 70% of the trispecific molecules in the preparation have the same ABM1:ABM2:ABM3 ratio.

[1309] 559. The preparation of any one of embodiments 508 to 546, wherein 60% to 95% of the trispecific molecules in the preparation have the same ABM1:ABM2:ABM3 ratio.

[1310] 560. The preparation of any one of embodiments 508 to 546, wherein 60% to 80% of the trispecific molecules in the preparation have the same ABM1:ABM2:ABM3 ratio.

[1311] 561. The preparation of any one of embodiments 508 to 546, wherein 60% to 70% of the trispecific molecules in the preparation have the same ABM1:ABM2:ABM3 ratio.

[1312] 562. The preparation of any one of embodiments 508 to 546, wherein 70% to 95% of the trispecific molecules in the preparation have the same ABM1:ABM2:ABM3 ratio.

[1313] 563. The preparation of any one of embodiments 508 to 546, wherein 70% to 80% of the trispecific molecules in the preparation have the same ABM1:ABM2:ABM3 ratio.

[1314] 564. The preparation of any one of embodiments 508 to 546, wherein 80% to 95% of the trispecific molecules in the preparation have the same ABM1:ABM2:ABM3 ratio.

[1315] 565. The preparation of any one of embodiments 508 to 546, wherein 95% to 99% of the trispecific molecules in the preparation have the same ABM1:ABM2:ABM3 ratio.

[1316] 566. A pharmaceutical composition comprising the TBM of any one of embodiments 1 to 468, the conjugate of any one of embodiments 469 to 507, or the preparation of any one of embodiments 508 to 565, and an excipient.

[1317] 567. A method of treating a subject with cancer, comprising administering to a subject suffering from cancer an effective amount of the TBM of any one of embodiments 1 to 468, the conjugate of any one of embodiments 469 to 507, the preparation of any one of embodiments 508 to 565, or the pharmaceutical composition of embodiment 566.

[1318] 568. The method of embodiment 567, wherein the cancer is selected from HER2+ cancer, acute lymphoblastic leukemia (ALL), acute myeloid leukemia (AML), adrenocortical carcinoma, anal cancer, appendix cancer, astrocytoma, basal cell carcinoma, brain tumor, bile duct cancer, bladder cancer, bone cancer, breast cancer, bronchial tumor, Burkitt Lymphoma, carcinoma of unknown primary origin, cardiac tumor, cervical cancer, chordoma, chronic lymphocytic leukemia (CLL), chronic myelogenous leukemia (CML), chronic myeloproliferative neoplasm, colon cancer, colorectal cancer, craniopharyngioma, cutaneous T-cell lymphoma, ductal carcinoma, embryonal tumor, endometrial cancer, ependymoma, esophageal cancer, esthesioneuroblastoma, fibrous histiocytoma, Ewing sarcoma, eye cancer, germ cell tumor, gallbladder cancer, gastric cancer, gastrointestinal carcinoid tumor, gastrointestinal stromal tumor, gestational trophoblastic disease, glioma, head and neck cancer, hairy cell leukemia, hepatocellular cancer, histiocytosis, Hodgkin lymphoma, hypopharyngeal cancer, intraocular melanoma, islet cell tumor, Kaposi sarcoma, kidney cancer, Langerhans cell histiocytosis, laryngeal cancer, leukemia, lip and oral cavity cancer, liver cancer, lobular carcinoma in situ, lung cancer, lymphoma, macroglobulinemia, malignant fibrous histiocytoma, melanoma, Merkel cell carcinoma, mesothelioma, metastatic squamous neck cancer with occult primary, midline tract carcinoma involving NUT gene, mouth cancer, multiple endocrine neoplasia syndrome, multiple myeloma, mycosis fungoides, myelodysplastic syndrome, myelodysplastic/myeloproliferative neoplasm, nasal cavity and para-nasal sinus cancer, nasopharyngeal cancer, neuroblastoma, non-Hodgkin lymphoma, non-small cell lung cancer, oropharyngeal cancer, osteosarcoma, ovarian cancer, pancreatic cancer, papillomatosis, paraganglioma, parathyroid cancer, penile cancer, pharyngeal cancer, pheochromocytomas, pituitary tumor, pleuropulmonary blastoma, primary central nervous system lymphoma, prostate cancer, rectal cancer, renal cell cancer, renal pelvis and ureter cancer, retinoblastoma, rhabdoid tumor, salivary gland cancer, Sezary syndrome, skin cancer, small cell lung cancer, small intestine cancer, soft tissue sarcoma, spinal cord tumor, stomach cancer, T-cell lymphoma, teratoid tumor, testicular cancer, throat cancer, thymoma and thymic carcinoma, thyroid cancer, urethral cancer, uterine cancer, vaginal cancer, vulvar cancer, and Wilms tumor.

[1319] 569. The method of any of embodiment 567 or embodiment 568, further comprising administering at least one further agent to the subject.

[1320] 570. A cell engineered to express the TBM of any one of embodiments 1 to 468.

[1321] 571. A cell transfected with one or more expression vectors comprising one or more nucleic acid sequences encoding the TBM of any one of embodiments 1 to 468 under the control of one or more promoters.

[1322] 572. The cell of embodiment 570 or embodiment 571, wherein expression of the TBM is under the control of an inducible promoter.

[1323] 573. The cell of any one of embodiments 570 to 572, wherein the TBM is produced in secretable form.

[1324] 574. A method of producing a TBM, comprising:
[1325] (a) culturing the cell of any one of embodiments 570 to 573 in conditions under which the TBM is expressed; and
[1326] (b) recovering the TBM from the cell culture.

[1327] 575. The TBM of embodiment 1, wherein ABM1 is
[1328] (a) an immunoglobulin scaffold-based ABM which is optionally an anti-CD2 antibody, an antibody fragment, an scFv, a dsFv, a Fv, a Fab, an scFab, a (Fab′)2, a single domain antibody (SDAB), a VH or VL domain, or a camelid VHH domain; or
[1329] (b) a non-immunoglobulin scaffold-based ABM which is optionally a Kunitz domain, an Adnexin, an Affibody, a DARPin, an Avimer, an Anticalin, a Lipocalin, a Centyrin, a Versabody, a Knottin, an Adnectin, a Pronectin, an Affitin/Nanofitin, an Affilin, an Atrimer/Tetranectin, a bicyclic peptide, a cys-knot, a Fn3 scaffold, an Obody, a Tn3, an Aan Affimer, BD, an Adhiron, a Duocalin, an Alphabody, an Armadillo Repeat Protein, a Repebody, or a Fynomer.

[1330] 576. The TBM of embodiment 575, wherein ABM1 is an scFv.

[1331] 577. The TBM of embodiment 575, wherein ABM1 is a Fab.

[1332] 578. The TBM of embodiment 577, wherein the Fab is a Fab heterodimer.

[1333] 579. The TBM of any one of embodiments 575 to 578, wherein ABM1 comprises any of the binding sequences set forth in Table 9.

[1334] 580. The TBM of embodiment 579, wherein ABM1 comprises the heavy and light chain CDRs of CD2-1.

[1335] 581. The TBM of embodiment 579, wherein ABM1 comprises the VH and VL sequences of CD2-1.

[1336] 582. The TBM of embodiment 579, wherein ABM1 comprises the VH and VL sequences of hu1CD2-1.

[1337] 583. The TBM of embodiment 579, wherein ABM1 comprises the VH and VL sequences of hu2CD2-1.

[1338] 584. The TBM of embodiment 1, wherein ABM1 is a CD58 moiety.

[1339] 585. The TBM of embodiment 584, wherein ABM1 comprises any of the binding sequences set forth in Table 10.

[1340] 586. The TBM of embodiment 585, wherein ABM1 comprises the amino acid sequence designated as CD58-2.

[1341] 587. The TBM of embodiment 585, wherein ABM1 comprises the amino acid sequence designated CD58-2.

[1342] 588. The TBM of embodiment 585, wherein ABM1 comprises the amino acid sequence designated as CD58-4.

[1343] 589. The TBM of embodiment 585, wherein ABM1 comprises the amino acid sequence designated as CD58-5.

[1344] 590. The TBM of any one of embodiments 1 to 589, wherein the component of a human TCR complex is CD3.

[1345] 591. The TBM of embodiment 590, wherein ABM2 is:
[1346] (a) an immunoglobulin scaffold-based ABM which is optionally an anti-CD3 antibody, an antibody fragment, an scFv, a dsFv, a Fv, a Fab, an scFab, a (Fab′)2, a single domain antibody (SDAB), a VH or VL domain, or a camelid VHH domain; or
[1347] (b) a non-immunoglobulin scaffold-based ABM which is optionally a Kunitz domain, an Adnexin, an Affibody, a DARPin, an Avimer, an Anticalin, a Lipocalin, a Centyrin, a Versabody, a Knottin, an Adnectin, a Pronectin, an Affitin/Nanofitin, an Affilin, an Atrimer/Tetranectin, a bicyclic peptide, a cys-knot, a Fn3 scaffold, an Obody, a Tn3, an Aan Affimer, BD, an Adhiron, a Duocalin, an Alphabody, an Armadillo Repeat Protein, a Repebody, or a Fynomer.

[1348] 592. The TBM of embodiment 590 or embodiment 591, wherein ABM2 comprises any of the binding sequences set forth in any one of Tables 7A through 7D.

[1349] 593. The TBM of embodiment 592, wherein ABM2 comprises the heavy and light chain CDRs (as defined by Kabat, Chothia or a combination thereof) of any one of the binding domains designated as CD3-1 through CD3-28.

[1350] 594. The TBM of embodiment 593, wherein ABM2 comprises the heavy and light chain CDRs (as defined by Kabat, Chothia or a combination thereof) of the binding domain designated as CD3-1.

[1351] 595. The TBM of embodiment 593, wherein ABM2 comprises the VH and/or VL sequences of the binding domain designated as CD3-1.

[1352] 596. The TBM of embodiment 593, wherein ABM2 comprises the heavy and light chain CDRs (as defined by Kabat, Chothia or a combination thereof) of the binding domain designated as CD3-2.

[1353] 597. The TBM of embodiment 593, wherein ABM2 comprises the VH and/or VL sequences of the binding domain designated as CD3-2.

[1354] 598. The TBM of embodiment 593, wherein ABM2 comprises the heavy and light chain CDRs (as defined by Kabat, Chothia or a combination thereof) of the binding domain designated as CD3-3.

[1355] 599. The TBM of embodiment 593, wherein ABM2 comprises the VH and/or VL sequences of the binding domain designated as CD3-3.

[1356] 600. The TBM of embodiment 593, wherein ABM2 comprises the heavy and light chain CDRs (as defined by Kabat, Chothia or a combination thereof) of the binding domain designated as CD3-4.

[1357] 601. The TBM of embodiment 593, wherein ABM2 comprises the VH and/or VL sequences of the binding domain designated as CD3-4.

[1358] 602. The TBM of embodiment 593, wherein ABM2 comprises the heavy and light chain CDRs (as defined by Kabat, Chothia or a combination thereof) of the binding domain designated as CD3-5.

[1359] 603. The TBM of embodiment 593, wherein ABM2 comprises the VH and/or VL sequences of the binding domain designated as CD3-5.

[1360] 604. The TBM of embodiment 593, wherein ABM2 comprises the heavy and light chain CDRs (as defined by Kabat, Chothia or a combination thereof) of the binding domain designated as CD3-6.

[1361] 605. The TBM of embodiment 593, wherein ABM2 comprises the VH and/or VL sequences of the binding domain designated as CD3-6.

[1362] 606. The TBM of embodiment 593, wherein ABM2 comprises the heavy and light chain CDRs (as defined by Kabat, Chothia or a combination thereof) of the binding domain designated as CD3-7.

[1363] 607. The TBM of embodiment 593, wherein ABM2 comprises the VH and/or VL sequences of the binding domain designated as CD3-7.

[1364] 608. The TBM of embodiment 593, wherein ABM2 comprises the heavy and light chain CDRs (as defined by Kabat, Chothia or a combination thereof) of the binding domain designated as CD3-8.

[1365] 609. The TBM of embodiment 593, wherein ABM2 comprises the VH and/or VL sequences of the binding domain designated as CD3-8.

[1366] 610. The TBM of embodiment 593, wherein ABM2 comprises the heavy and light chain CDRs (as defined by Kabat, Chothia or a combination thereof) of the binding domain designated as CD3-9.

[1367] 611. The TBM of embodiment 593, wherein ABM2 comprises the VH and/or VL sequences of the binding domain designated as CD3-9.

[1368] 612. The TBM of embodiment 593, wherein ABM2 comprises the heavy and light chain CDRs (as defined by Kabat, Chothia or a combination thereof) of the binding domain designated as CD3-10.

[1369] 613. The TBM of embodiment 593, wherein ABM2 comprises the VH and/or VL sequences of the binding domain designated as CD3-10.

[1370] 614. The TBM of embodiment 593, wherein ABM2 comprises the heavy and light chain CDRs (as defined by Kabat, Chothia or a combination thereof) of the binding domain designated as CD3-11.

[1371] 615. The TBM of embodiment 593, wherein ABM2 comprises the VH and/or VL sequences of the binding domain designated as CD3-11.

[1372] 616. The TBM of embodiment 593, wherein ABM2 comprises the heavy and light chain CDRs (as defined by Kabat, Chothia or a combination thereof) of the binding domain designated as CD3-12.

[1373] 617. The TBM of embodiment 593, wherein ABM2 comprises the VH and/or VL sequences of the binding domain designated as CD3-12.

[1374] 618. The TBM of embodiment 593, wherein ABM2 comprises the heavy and light chain CDRs (as defined by Kabat, Chothia or a combination thereof) of the binding domain designated as CD3-13.

[1375] 619. The TBM of embodiment 593, wherein ABM2 comprises the VH and/or VL sequences of the binding domain designated as CD3-13.

[1376] 620. The TBM of embodiment 593, wherein ABM2 comprises the heavy and light chain CDRs (as defined by Kabat, Chothia or a combination thereof) of the binding domain designated as CD3-14.

[1377] 621. The TBM of embodiment 593, wherein ABM2 comprises the VH and/or VL sequences of the binding domain designated as CD3-14.

[1378] 622. The TBM of embodiment 593, wherein ABM2 comprises the heavy and light chain CDRs (as defined by Kabat, Chothia or a combination thereof) of the binding domain designated as CD3-15.

[1379] 623. The TBM of embodiment 593, wherein ABM2 comprises the VH and/or VL sequences of the binding domain designated as CD3-15.

[1380] 624. The TBM of embodiment 593, wherein ABM2 comprises the heavy and light chain CDRs (as defined by Kabat, Chothia or a combination thereof) of the binding domain designated as CD3-16.

[1381] 625. The TBM of embodiment 593, wherein ABM2 comprises the VH and/or VL sequences of the binding domain designated as CD3-16.

[1382] 626. The TBM of embodiment 593, wherein ABM2 comprises the heavy and light chain CDRs (as defined by Kabat, Chothia or a combination thereof) of the binding domain designated as CD3-17.

[1383] 627. The TBM of embodiment 593, wherein ABM2 comprises the VH and/or VL sequences of the binding domain designated as CD3-17.

[1384] 628. The TBM of embodiment 593, wherein ABM2 comprises the heavy and light chain CDRs (as defined by Kabat, Chothia or a combination thereof) of the binding domain designated as CD3-18.

[1385] 629. The TBM of embodiment 593, wherein ABM2 comprises the VH and/or VL sequences of the binding domain designated as CD3-18.

[1386] 630. The TBM of embodiment 593, wherein ABM2 comprises the heavy and light chain CDRs (as defined by Kabat, Chothia or a combination thereof) of the binding domain designated as CD3-19.

[1387] 631. The TBM of embodiment 593, wherein ABM2 comprises the VH and/or VL sequences of the binding domain designated as CD3-19.

[1388] 632. The TBM of embodiment 593, wherein ABM2 comprises the heavy and light chain CDRs (as defined by Kabat, Chothia or a combination thereof) of the binding domain designated as CD3-20.

[1389] 633. The TBM of embodiment 593, wherein ABM2 comprises the VH and/or VL sequences of the binding domain designated as CD3-20.

[1390] 634. The TBM of embodiment 593, wherein ABM2 comprises the heavy and light chain CDRs (as defined by Kabat, Chothia or a combination thereof) of the binding domain designated as CD3-21.

[1391] 635. The TBM of embodiment 593, wherein ABM2 comprises the VH and/or VL sequences of the binding domain designated as CD3-21.

[1392] 636. The TBM of embodiment 593, wherein ABM2 comprises the heavy and light chain CDRs (as defined by Kabat, Chothia or a combination thereof) of the binding domain designated as CD3-22.

[1393] 637. The TBM of embodiment 593, wherein ABM2 comprises the VH and/or VL sequences of the binding domain designated as CD3-22.

[1394] 638. The TBM of embodiment 593, wherein ABM2 comprises the heavy and light chain CDRs (as defined by Kabat, Chothia or a combination thereof) of the binding domain designated as CD3-23.

[1395] 639. The TBM of embodiment 593, wherein ABM2 comprises the VH and/or VL sequences of the binding domain designated as CD3-23.

[1396] 640. The TBM of embodiment 593, wherein ABM2 comprises the heavy and light chain CDRs (as defined by Kabat, Chothia or a combination thereof) of the binding domain designated as CD3-24.

[1397] 641. The TBM of embodiment 593, wherein ABM2 comprises the VH and/or VL sequences of the binding domain designated as CD3-24.

[1398] 642. The TBM of embodiment 593, wherein ABM2 comprises the heavy and light chain CDRs (as defined by Kabat, Chothia or a combination thereof) of the binding domain designated as CD3-25.

[1399] 643. The TBM of embodiment 593, wherein ABM2 comprises the VH and/or VL sequences of the binding domain designated as CD3-25.

[1400] 644. The TBM of embodiment 593, wherein ABM2 comprises the heavy and light chain CDRs (as defined by Kabat, Chothia or a combination thereof) of the binding domain designated as CD3-26.

[1401] 645. The TBM of embodiment 593, wherein ABM2 comprises the VH and/or VL sequences of the binding domain designated as CD3-26.

[1402] 646. The TBM of embodiment 593, wherein ABM2 comprises the heavy and light chain CDRs (as defined by Kabat, Chothia or a combination thereof) of the binding domain designated as CD3-27.

[1403] 647. The TBM of embodiment 593, wherein ABM2 comprises the VH and/or VL sequences of the binding domain designated as CD3-27.

[1404] 648. The TBM of embodiment 593, wherein ABM2 comprises the heavy and light chain CDRs (as defined by Kabat, Chothia or a combination thereof) of the binding domain designated as CD3-28.

[1405] 649. The TBM of embodiment 593, wherein ABM2 comprises the VH and/or VL sequences of the binding domain designated as CD3-28.

[1406] 650. The TBM of embodiment 592, wherein ABM2 comprises the heavy and light chain CDRs (as defined by Kabat) of any one of the binding domains designated as CD3-29 through CD3-128.

[1407] 651. The TBM of embodiment 650, wherein ABM2 comprises the heavy and light chain CDRs (as defined by Kabat) of any one of the binding domains designated as CD3-29 through CD3-38.

[1408] 652. The TBM of embodiment 650, wherein ABM2 comprises the heavy and light chain CDRs (as defined by Kabat) of any one of the binding domains designated as CD3-39 through CD3-48.

[1409] 653. The TBM of embodiment 650, wherein ABM2 comprises the heavy and light chain CDRs (as defined by Kabat) of any one of the binding domains designated as CD3-49 through CD3-58.

[1410] 654. The TBM of embodiment 650, wherein ABM2 comprises the heavy and light chain CDRs (as defined by Kabat) of any one of the binding domains designated as CD3-59 through CD3-68.

[1411] 655. The TBM of embodiment 650, wherein ABM2 comprises the heavy and light chain CDRs (as defined by Kabat) of any one of the binding domains designated as CD3-69 through CD3-78.

[1412] 656. The TBM of embodiment 650, wherein ABM2 comprises the heavy and light chain CDRs (as defined by Kabat) of any one of the binding domains designated as CD3-79 through CD3-88.

[1413] 657. The TBM of embodiment 650, wherein ABM2 comprises the heavy and light chain CDRs (as defined by Kabat) of any one of the binding domains designated as CD3-89 through CD3-98.

[1414] 658. The TBM of embodiment 650, wherein ABM2 comprises the heavy and light chain CDRs (as defined by Kabat) of any one of the binding domains designated as CD3-99 through CD3-108.

[1415] 659. The TBM of embodiment 650, wherein ABM2 comprises the heavy and light chain CDRs (as defined by Kabat) of any one of the binding domains designated as CD3-109 through CD3-118.

[1416] 660. The TBM of embodiment 650, wherein ABM2 comprises the heavy and light chain CDRs (as defined by Kabat) of any one of the binding domains designated as CD3-119 through CD3-128.

[1417] 661. The TBM of any one of embodiments 1 to 589, wherein the component of a human TCR complex is the alpha subunit of the TCR.

[1418] 662. The TBM of embodiment 661, wherein ABM2:
[1419] (a) an immunoglobulin scaffold-based ABM which is optionally an antibody, an antibody fragment, an scFv, a dsFv, a Fv, a Fab, an scFab, a (Fab′)2, a single domain antibody (SDAB), a VH or VL domain, or a camelid VHH domain; or
[1420] (b) a non-immunoglobulin scaffold-based ABM which is optionally a Kunitz domain, an Adnexin, an Affibody, a DARPin, an Avimer, an Anticalin, a Lipocalin, a Centyrin, a Versabody, a Knottin, an Adnectin, a Pronectin, an Affitin/Nanofitin, an Affilin, an Atrimer/Tetranectin, a bicyclic peptide, a cys-knot, a Fn3 scaffold, an Obody, a Tn3, an Aan Affimer, BD, an Adhiron, a Duocalin, an Alphabody, an Armadillo Repeat Protein, a Repebody, or a Fynomer.

[1421] 663. The TBM of embodiment 662, wherein ABM2 comprises CDRs corresponding to the heavy and light chain CDRs of the antibody BMA031.

[1422] 664. The TBM of embodiment 662, wherein ABM2 comprises variable regions corresponding to the VH and VL of the antibody BMA031.

[1423] 665. The TBM of any one of embodiments 591 to 664, wherein ABM2 is an scFv.

[1424] 666. The TBM of any one of embodiments 591 to 664, wherein ABM2 is a Fab.

[1425] 667. The TBM of embodiment 666, wherein the Fab is a Fab heterodimer.

[1426] 668. The TBM of any one of embodiments 1 to 667, wherein the TAA is a lineage marker.

[1427] 669. The TBM of any one of embodiments 1 to 667, wherein the TAA is present on normal cells.

[1428] 670. The TBM of embodiment 669, wherein the TAA is upregulated on cancer cells.

[1429] 671. The TBM of any one of embodiments 1 to 670, wherein ABM3 is:
[1430] (a) an immunoglobulin scaffold-based ABM which is optionally an anti-TAA antibody, an antibody fragment, an scFv, a dsFv, a Fv, a Fab, an scFab, a (Fab′)2, a single domain antibody (SDAB), a VH or VL domain, or a camelid VHH domain; or
[1431] (b) a non-immunoglobulin scaffold-based ABM which is optionally a Kunitz domain, an Adnexin, an Affibody, a DARPin, an Avimer, an Anticalin, a Lipocalin, a Centyrin, a Versabody, a Knottin, an Adnectin, a Pronectin, an Affitin/Nanofitin, an Affilin, an Atrimer/Tetranectin, a bicyclic peptide, a cys-knot, a Fn3 scaffold, an Obody, a Tn3, an Aan Affimer, BD, an Adhiron, a Duocalin, an Alphabody, an Armadillo Repeat Protein, a Repebody, or a Fynomer.

[1432] 672. The TBM of embodiment 668, wherein the TAA is TSHR, CD171, CS-1, CLL-1, GD3, Tn Ag, FLT3, CD38, CD44v6, B7H3, KIT, IL-13Ra2, IL-11Ra, PSCA, PRSS21, VEGFR2, LewisY, CD24, PDGFR-beta, SSEA-4, MUC1, EGFR, NCAM, CAIX, LMP2, EphA2, fucosyl GM1, sLe, GM3, TGS5, HMWMAA, o-acetyl-GD2, GD2, folate receptor alpha, folate receptor beta, TEM1/CD248, TEM7R, CLDN6, GPRC5D, CXORF61, CD97, CD179a, ALK, polysialic acid, PLAC1, GloboH, NY-BR-1, UPK2, HAVCR1, ADRB3, PANX3, GPR20, LY6K, OR51E2, TAARP, WT1, ETV6-AML, sperm protein 17, XAGE1, Tie 2, MAD-CT-1, MAD-CT-2, Fos-related antigen 1, p53 mutant, hTERT, sarcoma translocation breakpoints, ML-IAP, ERG (TMPRSS2 ETS fusion gene), NA17, PAX3, Androgen receptor, Cyclin B1, MYCN, RhoC, CYP1B1, BORIS, SART3, PAX5, OY-TES1, LCK, AKAP-4, SSX2, CD79a, CD79b, CD72, LAIR1, FCAR, LILRA2, CD300LF, CLEC12A, BST2, EMR2, LY75, GPC3, FCRL5, IGLL1, CD19, CD20, CD30, ERBB2, ROR1, FLT3, TAAG72, CD22, CD33, GD2, BCMA, gp100Tn, FAP, tyrosinase, EPCAM, CEA, Igf-I receptor, or EphB2.

[1433] 673. The TBM of embodiment 668, wherein ABM3 comprises the CDRs or variable region sequences of the antibodies set forth in Table 11.

[1434] 674. The TBM of any one of embodiments 668 to 673, wherein the TAA is BCMA.

[1435] 675. The TBM of embodiment 674, wherein ABM3 comprises any of the binding sequences set forth in any one of Tables 12A, 12B, 12C, 12D, 12E, 12F or 12G.

[1436] 676. The TBM of embodiment 675, wherein ABM3 comprises the heavy and light chain CDRs (as defined by Kabat, Chothia or a combination thereof) of the antibody designated BCMA-1.

[1437] 677. The TBM of embodiment 675, wherein ABM3 comprises the VH and/or VL sequences of the antibody designated as BCMA-1.

[1438] 678. The TBM of embodiment 675, wherein ABM3 comprises the heavy and light chain CDRs (as defined by Kabat, Chothia or a combination thereof) of the antibody designated BCMA-2.

[1439] 679. The TBM of embodiment 675, wherein ABM3 comprises the VH and/or VL sequences of the antibody designated as BCMA-2.

[1440] 680. The TBM of embodiment 675, wherein ABM3 comprises the heavy and light chain CDRs (as defined by Kabat, Chothia or a combination thereof) of the antibody designated BCMA-3.

[1441] 681. The TBM of embodiment 675, wherein ABM3 comprises the VH and/or VL sequences of the antibody designated as BCMA-3.

[1442] 682. The TBM of embodiment 675, wherein ABM3 comprises the heavy and light chain CDRs (as defined by Kabat, Chothia or a combination thereof) of the antibody designated BCMA-4.

[1443] 683. The TBM of embodiment 675, wherein ABM3 comprises the VH and/or VL sequences of the antibody designated as BCMA-4.

[1444] 684. The TBM of embodiment 675, wherein ABM3 comprises the heavy and light chain CDRs (as defined by Kabat, Chothia or a combination thereof) of the antibody designated BCMA-5.

[1445] 685. The TBM of embodiment 675, wherein ABM3 comprises the VH and/or VL sequences of the antibody designated as BCMA-5.

[1446] 686. The TBM of embodiment 675, wherein ABM3 comprises the heavy and light chain CDRs (as defined by Kabat, Chothia or a combination thereof) of the antibody designated BCMA-6.

[1447] 687. The TBM of embodiment 675, wherein ABM3 comprises the VH and/or VL sequences of the antibody designated as BCMA-6.

[1448] 688. The TBM of embodiment 675, wherein ABM3 comprises the heavy and light chain CDRs (as defined by Kabat, Chothia or a combination thereof) of the antibody designated BCMA-7.

[1449] 689. The TBM of embodiment 675, wherein ABM3 comprises the VH and/or VL sequences of the antibody designated as BCMA-7.

[1450] 690. The TBM of embodiment 675, wherein ABM3 comprises the heavy and light chain CDRs (as defined by Kabat, Chothia or a combination thereof) of the antibody designated BCMA-8.

[1451] 691. The TBM of embodiment 675, wherein ABM3 comprises the VH and/or VL sequences of the antibody designated as BCMA-8.

[1452] 692. The TBM of embodiment 675, wherein ABM3 comprises the heavy and light chain CDRs (as defined by Kabat, Chothia or a combination thereof) of the antibody designated BCMA-9.

[1453] 693. The TBM of embodiment 675, wherein ABM3 comprises the VH and/or VL sequences of the antibody designated as BCMA-9.

[1454] 694. The TBM of embodiment 675, wherein ABM3 comprises the heavy and light chain CDRs (as defined by Kabat, Chothia or a combination thereof) of the antibody designated BCMA-10.

[1455] 695. The TBM of embodiment 675, wherein ABM3 comprises the VH and/or VL sequences of the antibody designated as BCMA-10.

[1456] 696. The TBM of embodiment 675, wherein ABM3 comprises the heavy and light chain CDRs (as defined by Kabat, Chothia or a combination thereof) of the antibody designated BCMA-11.

[1457] 697. The TBM of embodiment 675, wherein ABM3 comprises the VH and/or VL sequences of the antibody designated as BCMA-11.

[1458] 698. The TBM of embodiment 675, wherein ABM3 comprises the heavy and light chain CDRs (as defined by Kabat, Chothia or a combination thereof) of the antibody designated BCMA-12.

[1459] 699. The TBM of embodiment 675, wherein ABM3 comprises the VH and/or VL sequences of the antibody designated as BCMA-12.

[1460] 700. The TBM of embodiment 675, wherein ABM3 comprises the heavy and light chain CDRs (as defined by Kabat, Chothia or a combination thereof) of the antibody designated BCMA-13.

[1461] 701. The TBM of embodiment 675, wherein ABM3 comprises the VH and/or VL sequences of the antibody designated as BCMA-13.

[1462] 702. The TBM of embodiment 675, wherein ABM3 comprises the heavy and light chain CDRs (as defined by Kabat, Chothia or a combination thereof) of the antibody designated BCMA-14.

[1463] 703. The TBM of embodiment 675, wherein ABM3 comprises the VH and/or VL sequences of the antibody designated as BCMA-14.

[1464] 704. The TBM of embodiment 675, wherein ABM3 comprises the heavy and light chain CDRs (as defined by Kabat, Chothia or a combination thereof) of the antibody designated BCMA-15.

[1465] 705. The TBM of embodiment 675, wherein ABM3 comprises the VH and/or VL sequences of the antibody designated as BCMA-15.

[1466] 706. The TBM of embodiment 675, wherein ABM3 comprises the heavy and light chain CDRs (as defined by Kabat, Chothia or a combination thereof) of the antibody designated BCMA-16.

[1467] 707. The TBM of embodiment 675, wherein ABM3 comprises the VH and/or VL sequences of the antibody designated as BCMA-16.

[1468] 708. The TBM of embodiment 675, wherein ABM3 comprises the heavy and light chain CDRs (as defined by Kabat, Chothia or a combination thereof) of the antibody designated BCMA-17.

[1469] 709. The TBM of embodiment 675, wherein ABM3 comprises the VH and/or VL sequences of the antibody designated as BCMA-17.

[1470] 710. The TBM of embodiment 675, wherein ABM3 comprises the heavy and light chain CDRs (as defined by Kabat, Chothia or a combination thereof) of the antibody designated BCMA-18.

[1471] 711. The TBM of embodiment 675, wherein ABM3 comprises the VH and/or VL sequences of the antibody designated as BCMA-18.

[1472] 712. The TBM of embodiment 675, wherein ABM3 comprises the heavy and light chain CDRs (as defined by Kabat, Chothia or a combination thereof) of the antibody designated BCMA-19.

[1473] 713. The TBM of embodiment 675, wherein ABM3 comprises the VH and/or VL sequences of the antibody designated as BCMA-19.

[1474] 714. The TBM of embodiment 675, wherein ABM3 comprises the heavy and light chain CDRs (as defined by Kabat, Chothia or a combination thereof) of the antibody designated BCMA-20.

[1475] 715. The TBM of embodiment 675, wherein ABM3 comprises the VH and/or VL sequences of the antibody designated as BCMA-20.

[1476] 716. The TBM of embodiment 675, wherein ABM3 comprises the heavy and light chain CDRs (as defined by Kabat, Chothia or a combination thereof) of the antibody designated BCMA-21.

[1477] 717. The TBM of embodiment 675, wherein ABM3 comprises the VH and/or VL sequences of the antibody designated as BCMA-21.

[1478] 718. The TBM of embodiment 675, wherein ABM3 comprises the heavy and light chain CDRs (as defined by Kabat, Chothia or a combination thereof) of the antibody designated BCMA-22.

[1479] 719. The TBM of embodiment 675, wherein ABM3 comprises the VH and/or VL sequences of the antibody designated as BCMA-22.

[1480] 720. The TBM of embodiment 675, wherein ABM3 comprises the heavy and light chain CDRs (as defined by Kabat, Chothia or a combination thereof) of the antibody designated BCMA-23.

[1481] 721. The TBM of embodiment 675, wherein ABM3 comprises the VH and/or VL sequences of the antibody designated as BCMA-23.

[1482] 722. The TBM of embodiment 675, wherein ABM3 comprises the heavy and light chain CDRs (as defined by Kabat, Chothia or a combination thereof) of the antibody designated BCMA-24.

[1483] 723. The TBM of embodiment 675, wherein ABM3 comprises the VH and/or VL sequences of the antibody designated as BCMA-24.

[1484] 724. The TBM of embodiment 675, wherein ABM3 comprises the heavy and light chain CDRs (as defined by Kabat, Chothia or a combination thereof) of the antibody designated BCMA-25.

[1485] 725. The TBM of embodiment 675, wherein ABM3 comprises the VH and/or VL sequences of the antibody designated as BCMA-25.

[1486] 726. The TBM of embodiment 675, wherein ABM3 comprises the heavy and light chain CDRs (as defined by Kabat, Chothia or a combination thereof) of the antibody designated BCMA-26.

[1487] 727. The TBM of embodiment 675, wherein ABM3 comprises the VH and/or VL sequences of the antibody designated as BCMA-26.

[1488] 728. The TBM of embodiment 675, wherein ABM3 comprises the heavy and light chain CDRs (as defined by Kabat, Chothia or a combination thereof) of the antibody designated BCMA-27.

[1489] 729. The TBM of embodiment 675, wherein ABM3 comprises the VH and/or VL sequences of the antibody designated as BCMA-27.

[1490] 730. The TBM of embodiment 675, wherein ABM3 comprises the heavy and light chain CDRs (as defined by Kabat, Chothia or a combination thereof) of the antibody designated BCMA-28.

[1491] 731. The TBM of embodiment 675, wherein ABM3 comprises the VH and/or VL sequences of the antibody designated as BCMA-28.

[1492] 732. The TBM of embodiment 675, wherein ABM3 comprises the heavy and light chain CDRs (as defined by Kabat, Chothia or a combination thereof) of the antibody designated BCMA-29.

[1493] 733. The TBM of embodiment 675, wherein ABM3 comprises the VH and/or VL sequences of the antibody designated as BCMA-29.

[1494] 734. The TBM of embodiment 675, wherein ABM3 comprises the heavy and light chain CDRs (as defined by Kabat, Chothia or a combination thereof) of the antibody designated BCMA-30.

[1495] 735. The TBM of embodiment 675, wherein ABM3 comprises the VH and/or VL sequences of the antibody designated as BCMA-30.

[1496] 736. The TBM of embodiment 675, wherein ABM3 comprises the heavy and light chain CDRs (as defined by Kabat, Chothia or a combination thereof) of the antibody designated BCMA-31.

[1497] 737. The TBM of embodiment 675, wherein ABM3 comprises the VH and/or VL sequences of the antibody designated as BCMA-31.

[1498] 738. The TBM of embodiment 675, wherein ABM3 comprises the heavy and light chain CDRs (as defined by Kabat, Chothia or a combination thereof) of the antibody designated BCMA-32.

[1499] 739. The TBM of embodiment 675, wherein ABM3 comprises the VH and/or VL sequences of the antibody designated as BCMA-32.

[1500] 740. The TBM of embodiment 675, wherein ABM3 comprises the heavy and light chain CDRs (as defined by Kabat, Chothia or a combination thereof) of the antibody designated BCMA-33.

[1501] 741. The TBM of embodiment 675, wherein ABM3 comprises the VH and/or VL sequences of the antibody designated as BCMA-33.

[1502] 742. The TBM of embodiment 675, wherein ABM3 comprises the heavy and light chain CDRs (as defined by Kabat, Chothia or a combination thereof) of the antibody designated BCMA-34.

[1503] 743. The TBM of embodiment 675, wherein ABM3 comprises the VH and/or VL sequences of the antibody designated as BCMA-34.

[1504] 744. The TBM of embodiment 675, wherein ABM3 comprises the heavy and light chain CDRs (as defined by Kabat, Chothia or a combination thereof) of the antibody designated BCMA-35.

[1505] 745. The TBM of embodiment 675, wherein ABM3 comprises the VH and/or VL sequences of the antibody designated as BCMA-35.

[1506] 746. The TBM of embodiment 675, wherein ABM3 comprises the heavy and light chain CDRs (as defined by Kabat, Chothia or a combination thereof) of the antibody designated BCMA-36.

[1507] 747. The TBM of embodiment 675, wherein ABM3 comprises the VH and/or VL sequences of the antibody designated as BCMA-36.

[1508] 748. The TBM of embodiment 675, wherein ABM3 comprises the heavy and light chain CDRs (as defined by Kabat, Chothia or a combination thereof) of the antibody designated BCMA-37.

[1509] 749. The TBM of embodiment 675, wherein ABM3 comprises the VH and/or VL sequences of the antibody designated as BCMA-37.

[1510] 750. The TBM of embodiment 675, wherein ABM3 comprises the heavy and light chain CDRs (as defined by Kabat, Chothia or a combination thereof) of the antibody designated BCMA-38.

[1511] 751. The TBM of embodiment 675, wherein ABM3 comprises the VH and/or VL sequences of the antibody designated as BCMA-38.

[1512] 752. The TBM of embodiment 675, wherein ABM3 comprises the heavy and light chain CDRs (as defined by Kabat, Chothia or a combination thereof) of the antibody designated BCMA-39.

[1513] 753. The TBM of embodiment 675, wherein ABM3 comprises the VH and/or VL sequences of the antibody designated as BCMA-39.

[1514] 754. The TBM of embodiment 675, wherein ABM3 comprises the heavy and light chain CDRs (as defined by Kabat, Chothia or a combination thereof) of the antibody designated BCMA-40.

[1515] 755. The TBM of embodiment 675, wherein ABM3 comprises the VH and/or VL sequences of the antibody designated as BCMA-40.

[1516] 756. The TBM of any one of embodiments 668 to 673, wherein the TAA is CD19.

[1517] 757. The TBM of embodiment 756, wherein ABM3 comprises any of the binding sequences set forth Table 13.

[1518] 758. The TBM of embodiment 757, wherein ABM3 comprises:
[1519] (a) a CDR-H1 having the amino acid sequence of the CDR designated as CD19-H1;
[1520] (b) a CDR-H2 having the amino acid sequence of any one of the CDRs designated as CD19-H2A, HD19-H2B, CD19-H2C and CD19-H2D;
[1521] (c) a CDR-H3 having the amino acid sequence of the CDR designated as CD19-H3;
[1522] (d) a CDR-L1 having the amino acid sequence of the CDR designated as CD19-L1;
[1523] (e) a CDR-L2 having the amino acid sequence of the CDR designated as CD19-L2; and
[1524] (f) a CDR-L3 having the amino acid sequence of the CDR designated as CD19-L23.

[1525] 759. The TBM of embodiment 757, wherein ABM3 comprises:
[1526] (a) a VH having the amino acid sequence of any one of the VH's designated as CD19-VHA, CD19-VHB, CD19-VHC, and CD19-VHD; and
[1527] (b) a VL having the amino acid sequence of any one of the VL's designated as CD19-VLA and CD19-VLB.

[1528] 760. The TBM of any one of embodiments any one of embodiments 668 to 759, wherein ABM3 is an scFv.

[1529] 761. The TBM of any one of embodiments 668 to 757, wherein ABM3 is a Fab.

[1530] 762. The TBM of embodiment 761, wherein the Fab is a Fab heterodimer.

[1531] 763. The TBM of any one of embodiments 1 to 762 which comprises an Fc domain.

[1532] 764. The TBM of embodiment 763, wherein the Fc domain is an Fc heterodimer.

[1533] 765. The TBM of embodiment 764, wherein the Fc heterodimer comprises knob-in-hole (“KIH”) modifications.

[1534] 766. The TBM of embodiment 765, wherein the KIH modifications are any of the KIH modifications described in Section 4.3.1.5.1 or in Table 2.

[1535] 767. The TBM of embodiment 765, wherein the KIH modifications are any of the alternative KIH modifications described in Section 4.3.1.5.2 or in Table 2.

[1536] 768. The TBM of any one of embodiments 764 to 767, which comprises polar bridge modifications.

[1537] 769. The TBM of embodiment 768, wherein the polar bridge modification are any of the polar bridge modifications described in Section 4.3.1.5.3 or in Table 2.

[1538] 770. The TBM of any one of embodiments to 764 to 769, which comprises at least one of the Fc modifications designated as Fc 1 through Fc 150.

[1539] 771. The TBM of embodiment 770, which comprises at least one of the Fc modifications designated as Fc 1 through Fc 5.

[1540] 772. The TBM of embodiment 770, which comprises at least one of the Fc modifications designated as Fc 6 through Fc 10.

[1541] 773. The TBM of embodiment 770, which comprises at least one of the Fc modifications designated as Fc 11 through Fc 15.

[1542] 774. The TBM of embodiment 770, which comprises at least one of the Fc modifications designated as Fc 16 through Fc 20.

[1543] 775. The TBM of embodiment 770, which comprises at least one of the Fc modifications designated as Fc 21 through Fc 25.

[1544] 776. The TBM of embodiment 770, which comprises at least one of the Fc modifications designated as Fc 26 through Fc 30.

[1545] 777. The TBM of embodiment 770, which comprises at least one of the Fc modifications designated as Fc 31 through Fc 35.

[1546] 778. The TBM of embodiment 770, which comprises at least one of the Fc modifications designated as Fc 36 through Fc 40.

[1547] 779. The TBM of embodiment 770, which comprises at least one of the Fc modifications designated as Fc 41 through Fc 45.

[1548] 780. The TBM of embodiment 770, which comprises at least one of the Fc modifications designated as Fc 46 through Fc 50.

[1549] 781. The TBM of embodiment 770, which comprises at least one of the Fc modifications designated as Fc 51 through Fc 55.

[1550] 782. The TBM of embodiment 770, which comprises at least one of the Fc modifications designated as Fc 56 through Fc 60.

[1551] 783. The TBM of embodiment 770, which comprises at least one of the Fc modifications designated as Fc 61 through Fc 65.

[1552] 784. The TBM of embodiment 770, which comprises at least one of the Fc modifications designated as Fc 66 through Fc 70.

[1553] 785. The TBM of embodiment 770, which comprises at least one of the Fc modifications designated as Fc 71 through Fc 75.

[1554] 786. The TBM of embodiment 770, which comprises at least one of the Fc modifications designated as Fc 76 through Fc 80.

[1555] 787. The TBM of embodiment 770, which comprises at least one of the Fc modifications designated as Fc 81 through Fc 85.

[1556] 788. The TBM of embodiment 770, which comprises at least one of the Fc modifications designated as Fc 86 through Fc 90.

[1557] 789. The TBM of embodiment 770, which comprises at least one of the Fc modifications designated as Fc 91 through Fc 95.

[1558] 790. The TBM of embodiment 770, which comprises at least one of the Fc modifications designated as Fc 96 through Fc 100.

[1559] 791. The TBM of embodiment 770, which comprises at least one of the Fc modifications designated as Fc 101 through Fc 105.

[1560] 792. The TBM of embodiment 770, which comprises at least one of the Fc modifications designated as Fc 106 through Fc 110.

[1561] 793. The TBM of embodiment 770, which comprises at least one of the Fc modifications designated as Fc 111 through Fc 115.

[1562] 794. The TBM of embodiment 770, which comprises at least one of the Fc modifications designated as Fc 116 through Fc 120.

[1563] 795. The TBM of embodiment 770, which comprises at least one of the Fc modifications designated as Fc 121 through Fc 125.

[1564] 796. The TBM of embodiment 770, which comprises at least one of the Fc modifications designated as Fc 126 through Fc 130.

[1565] 797. The TBM of embodiment 770, which comprises at least one of the Fc modifications designated as Fc 131 through Fc 135.

[1566] 798. The TBM of embodiment 770, which comprises at least one of the Fc modifications designated as Fc 136 through Fc 140.

[1567] 799. The TBM of embodiment 770, which comprises at least one of the Fc modifications designated as Fc 141 through Fc 145.

[1568] 800. The TBM of embodiment 770, which comprises at least one of the Fc modifications designated as Fc 146 through Fc 150.

[1569] 801. The TBM of any one of embodiments 763 to 800, wherein the Fc domain has altered effector function.

[1570] 802. The TBM of embodiment 801, wherein the Fc domain has altered binding to one or more Fc receptors.

[1571] 803. The TBM of embodiment 802, wherein the one or more Fc receptors comprise FcRN.

[1572] 804. The TBM of embodiment 802 or embodiment 803, wherein the one or more Fc receptors comprise leukocyte receptors.

[1573] 805. The TBM of any one of embodiments 763 to 804, wherein the Fc has modified disulfide bond architecture.

[1574] 806. The TBM of any one of embodiments 763 to 805, wherein the Fc has altered glycosylation patterns.

[1575] 807. The TBM of any one of embodiments 763 to 806, wherein the Fc comprises a hinge region.

[1576] 808. The TBM of embodiment 807, wherein the hinge region comprises any of the hinge regions described in Section 4.3.2.

[1577] 809. The TBM of embodiment 808, wherein the hinge region comprises the amino acid sequence of the hinge region designated H1.

[1578] 810. The TBM of embodiment 808, wherein the hinge region comprises the amino acid sequence of the hinge region designated H2.

[1579] 811. The TBM of embodiment 808, wherein the hinge region comprises the amino acid sequence of the hinge region designated H3.

[1580] 812. The TBM of embodiment 808, wherein the hinge region comprises the amino acid sequence of the hinge region designated H4.

[1581] 813. The TBM of embodiment 808, wherein the hinge region comprises the amino acid sequence of the hinge region designated H5.

[1582] 814. The TBM of embodiment 808, wherein the hinge region comprises the amino acid sequence of the hinge region designated H6.

[1583] 815. The TBM of embodiment 808, wherein the hinge region comprises the amino acid sequence of the hinge region designated H7.

[1584] 816. The TBM of embodiment 808, wherein the hinge region comprises the amino acid sequence of the hinge region designated H8.

[1585] 817. The TBM of embodiment 808, wherein the hinge region comprises the amino acid sequence of the hinge region designated H9.

[1586] 818. The TBM of embodiment 808, wherein the hinge region comprises the amino acid sequence of the hinge region designated H10.

[1587] 819. The TBM of embodiment 808, wherein the hinge region comprises the amino acid sequence of the hinge region designated H11.

[1588] 820. The TBM of embodiment 808, wherein the hinge region comprises the amino acid sequence of the hinge region designated H12.

[1589] 821. The TBM of embodiment 808, wherein the hinge region comprises the amino acid sequence of the hinge region designated H13.

[1590] 822. The TBM of embodiment 808, wherein the hinge region comprises the amino acid sequence of the hinge region designated H14.

[1591] 823. The TBM of embodiment 808, wherein the hinge region comprises the amino acid sequence of the hinge region designated H15.

[1592] 824. The TBM of embodiment 808, wherein the hinge region comprises the amino acid sequence of the hinge region designated H16.

[1593] 825. The TBM of embodiment 808, wherein the hinge region comprises the amino acid sequence of the hinge region designated H17.

[1594] 826. The TBM of embodiment 808, wherein the hinge region comprises the amino acid sequence of the hinge region designated H18.

[1595] 827. The TBM of embodiment 808, wherein the hinge region comprises the amino acid sequence of the hinge region designated H19.

[1596] 828. The TBM of embodiment 808, wherein the hinge region comprises the amino acid sequence of the hinge region designated H20.

[1597] 829. The TBM of embodiment 808, wherein the hinge region comprises the amino acid sequence of the hinge region designated H21.

[1598] 830. The TBM of any one of embodiments 1 to 829, which comprises at least one scFv domain.

[1599] 831. The TBM of embodiment 830, wherein at least one scFv comprises a linker connecting the VH and VL domains.

[1600] 832. The TBM of embodiment 831, wherein the linker is 5 to 25 amino acids in length.

[1601] 833. The TBM of embodiment 832, wherein the linker is 12 to 20 amino acids in length.

[1602] 834. The TBM of any one of embodiments 831 to 833, wherein the linker is a charged linker and/or a flexible linker.

[1603] 835. The TBM of any one of embodiments 831 to 834, wherein the linker is selected from any one of linkers L1 through L54.

[1604] 836. The TBM of embodiment 835, wherein the linker region comprises the amino acid sequence of the linker designated L1.

[1605] 837. The TBM of embodiment 835, wherein the linker region comprises the amino acid sequence of the linker designated L2.

[1606] 838. The TBM of embodiment 835, wherein the linker region comprises the amino acid sequence of the linker designated L3.

[1607] 839. The TBM of embodiment 835, wherein the linker region comprises the amino acid sequence of the linker designated L4.

[1608] 840. The TBM of embodiment 835, wherein the linker region comprises the amino acid sequence of the linker designated L5.

[1609] 841. The TBM of embodiment 835, wherein the linker region comprises the amino acid sequence of the linker designated L6.

[1610] 842. The TBM of embodiment 835, wherein the linker region comprises the amino acid sequence of the linker designated L7.

[1611] 843. The TBM of embodiment 835, wherein the linker region comprises the amino acid sequence of the linker designated L8.

[1612] 844. The TBM of embodiment 835, wherein the linker region comprises the amino acid sequence of the linker designated L9.

[1613] 845. The TBM of embodiment 835, wherein the linker region comprises the amino acid sequence of the linker designated L10.

[1614] 846. The TBM of embodiment 835, wherein the linker region comprises the amino acid sequence of the linker designated L11.

[1615] 847. The TBM of embodiment 835, wherein the linker region comprises the amino acid sequence of the linker designated L12.

[1616] 848. The TBM of embodiment 835, wherein the linker region comprises the amino acid sequence of the linker designated L13.

[1617] 849. The TBM of embodiment 835, wherein the linker region comprises the amino acid sequence of the linker designated L14.

[1618] 850. The TBM of embodiment 835, wherein the linker region comprises the amino acid sequence of the linker designated L15.

[1619] 851. The TBM of embodiment 835, wherein the linker region comprises the amino acid sequence of the linker designated L16.

[1620] 852. The TBM of embodiment 835, wherein the linker region comprises the amino acid sequence of the linker designated L17.

[1621] 853. The TBM of embodiment 835, wherein the linker region comprises the amino acid sequence of the linker designated L18.

[1622] 854. The TBM of embodiment 835, wherein the linker region comprises the amino acid sequence of the linker designated L19.

[1623] 855. The TBM of embodiment 835, wherein the linker region comprises the amino acid sequence of the linker designated L20.

[1624] 856. The TBM of embodiment 835, wherein the linker region comprises the amino acid sequence of the linker designated L21.

[1625] 857. The TBM of embodiment 835, wherein the linker region comprises the amino acid sequence of the linker designated L22.

[1626] 858. The TBM of embodiment 835, wherein the linker region comprises the amino acid sequence of the linker designated L23.

[1627] 859. The TBM of embodiment 835, wherein the linker region comprises the amino acid sequence of the linker designated L24.

[1628] 860. The TBM of embodiment 835, wherein the linker region comprises the amino acid sequence of the linker designated L25.

[1629] 861. The TBM of embodiment 835, wherein the linker region comprises the amino acid sequence of the linker designated L26.

[1630] 862. The TBM of embodiment 835, wherein the linker region comprises the amino acid sequence of the linker designated L27.

[1631] 863. The TBM of embodiment 835, wherein the linker region comprises the amino acid sequence of the linker designated L28.

[1632] 864. The TBM of embodiment 835, wherein the linker region comprises the amino acid sequence of the linker designated L29.

[1633] 865. The TBM of embodiment 835, wherein the linker region comprises the amino acid sequence of the linker designated L30.

[1634] 866. The TBM of embodiment 835, wherein the linker region comprises the amino acid sequence of the linker designated L31.

[1635] 867. The TBM of embodiment 835, wherein the linker region comprises the amino acid sequence of the linker designated L32.

[1636] 868. The TBM of embodiment 835, wherein the linker region comprises the amino acid sequence of the linker designated L33.

[1637] 869. The TBM of embodiment 835, wherein the linker region comprises the amino acid sequence of the linker designated L34.

[1638] 870. The TBM of embodiment 835, wherein the linker region comprises the amino acid sequence of the linker designated L35.

[1639] 871. The TBM of embodiment 835, wherein the linker region comprises the amino acid sequence of the linker designated L36.

[1640] 872. The TBM of embodiment 835, wherein the linker region comprises the amino acid sequence of the linker designated L37.

[1641] 873. The TBM of embodiment 835, wherein the linker region comprises the amino acid sequence of the linker designated L38.

[1642] 874. The TBM of embodiment 835, wherein the linker region comprises the amino acid sequence of the linker designated L39.

[1643] 875. The TBM of embodiment 835, wherein the linker region comprises the amino acid sequence of the linker designated L40.

[1644] 876. The TBM of embodiment 835, wherein the linker region comprises the amino acid sequence of the linker designated L41.

[1645] 877. The TBM of embodiment 835, wherein the linker region comprises the amino acid sequence of the linker designated L42.

[1646] 878. The TBM of embodiment 835, wherein the linker region comprises the amino acid sequence of the linker designated L43.

[1647] 879. The TBM of embodiment 835, wherein the linker region comprises the amino acid sequence of the linker designated L44.

[1648] 880. The TBM of embodiment 835, wherein the linker region comprises the amino acid sequence of the linker designated L45.

[1649] 881. The TBM of embodiment 835, wherein the linker region comprises the amino acid sequence of the linker designated L46.

[1650] 882. The TBM of embodiment 835, wherein the linker region comprises the amino acid sequence of the linker designated L47.

[1651] 883. The TBM of embodiment 835, wherein the linker region comprises the amino acid sequence of the linker designated L48.

[1652] 884. The TBM of embodiment 835, wherein the linker region comprises the amino acid sequence of the linker designated L49.

[1653] 885. The TBM of embodiment 835, wherein the linker region comprises the amino acid sequence of the linker designated L50.

[1654] 886. The TBM of embodiment 835, wherein the linker region comprises the amino acid sequence of the linker designated L51.

[1655] 887. The TBM of embodiment 835, wherein the linker region comprises the amino acid sequence of the linker designated L52.

[1656] 888. The TBM of embodiment 835, wherein the linker region comprises the amino acid sequence of the linker designated L53.

[1657] 889. The TBM of embodiment 835, wherein the linker region comprises the amino acid sequence of the linker designated L54.

[1658] 890. The TBM of any one of embodiments 1 to 889, which comprises at least one Fab domain.

[1659] 891. The TBM of embodiment 890, wherein at least one Fab domain comprises any of the Fab heterodimerization modifications set forth in Table 1.

[1660] 892. The TBM of embodiment 891, wherein at least one Fab domain comprises the Fab heterodimerization modifications designated as F1.

[1661] 893. The TBM of embodiment 891, wherein at least one Fab domain comprises the Fab heterodimerization modifications designated as F2.

[1662] 894. The TBM of embodiment 891, wherein at least one Fab domain comprises the Fab heterodimerization modifications designated as F3.

[1663] 895. The TBM of embodiment 891, wherein at least one Fab domain comprises the Fab heterodimerization modifications designated as F4.

[1664] 896. The TBM of embodiment 891, wherein at least one Fab domain comprises the Fab heterodimerization modifications designated as F5.

[1665] 897. The TBM of embodiment 891, wherein at least one Fab domain comprises the Fab heterodimerization modifications designated as F6.

[1666] 898. The TBM of embodiment 891, wherein at least one Fab domain comprises the Fab heterodimerization modifications designated as F7.

[1667] 899. The TBM of any one of embodiments 1 to 898, which comprises at least two ABMs, an ABM and an ABM chain, or two ABM chains connected to one another via a linker.

[1668] 900. The TBM of embodiment 899, wherein the linker is 5 to 25 amino acids in length.

[1669] 901. The TBM of embodiment 900, wherein the linker is 12 to 20 amino acids in length.

[1670] 902. The TBM of any one of embodiments 899 to 901, wherein the linker is a charged linker and/or a flexible linker.

[1671] 903. The TBM of any one of embodiments 899 to 902, wherein the linker is selected from any one of linkers L1 through L54.

[1672] 904. The TBM of embodiment 903, wherein the linker region comprises the amino acid sequence of the linker designated L1.

[1673] 905. The TBM of embodiment 903, wherein the linker region comprises the amino acid sequence of the linker designated L2.

[1674] 906. The TBM of embodiment 903, wherein the linker region comprises the amino acid sequence of the linker designated L3.

[1675] 907. The TBM of embodiment 903, wherein the linker region comprises the amino acid sequence of the linker designated L4.

[1676] 908. The TBM of embodiment 903, wherein the linker region comprises the amino acid sequence of the linker designated L5.

[1677] 909. The TBM of embodiment 903, wherein the linker region comprises the amino acid sequence of the linker designated L6.

[1678] 910. The TBM of embodiment 903, wherein the linker region comprises the amino acid sequence of the linker designated L7.

[1679] 911. The TBM of embodiment 903, wherein the linker region comprises the amino acid sequence of the linker designated L8.

[1680] 912. The TBM of embodiment 903, wherein the linker region comprises the amino acid sequence of the linker designated L9.

[1681] 913. The TBM of embodiment 903, wherein the linker region comprises the amino acid sequence of the linker designated L10.

[1682] 914. The TBM of embodiment 903, wherein the linker region comprises the amino acid sequence of the linker designated L11.

[1683] 915. The TBM of embodiment 903, wherein the linker region comprises the amino acid sequence of the linker designated L12.

[1684] 916. The TBM of embodiment 903, wherein the linker region comprises the amino acid sequence of the linker designated L13.

[1685] 917. The TBM of embodiment 903, wherein the linker region comprises the amino acid sequence of the linker designated L14.

[1686] 918. The TBM of embodiment 903, wherein the linker region comprises the amino acid sequence of the linker designated L15.

[1687] 919. The TBM of embodiment 903, wherein the linker region comprises the amino acid sequence of the linker designated L16.

[1688] 920. The TBM of embodiment 903, wherein the linker region comprises the amino acid sequence of the linker designated L17.

[1689] 921. The TBM of embodiment 903, wherein the linker region comprises the amino acid sequence of the linker designated L18.

[1690] 922. The TBM of embodiment 903, wherein the linker region comprises the amino acid sequence of the linker designated L19.

[1691] 923. The TBM of embodiment 903, wherein the linker region comprises the amino acid sequence of the linker designated L20.

[1692] 924. The TBM of embodiment 903, wherein the linker region comprises the amino acid sequence of the linker designated L21.

[1693] 925. The TBM of embodiment 903, wherein the linker region comprises the amino acid sequence of the linker designated L22.

[1694] 926. The TBM of embodiment 903, wherein the linker region comprises the amino acid sequence of the linker designated L23.

[1695] 927. The TBM of embodiment 903, wherein the linker region comprises the amino acid sequence of the linker designated L24.

[1696] 928. The TBM of embodiment 903, wherein the linker region comprises the amino acid sequence of the linker designated L25.

[1697] 929. The TBM of embodiment 903, wherein the linker region comprises the amino acid sequence of the linker designated L26.

[1698] 930. The TBM of embodiment 903, wherein the linker region comprises the amino acid sequence of the linker designated L27.

[1699] 931. The TBM of embodiment 903, wherein the linker region comprises the amino acid sequence of the linker designated L28.

[1700] 932. The TBM of embodiment 903, wherein the linker region comprises the amino acid sequence of the linker designated L29.

[1701] 933. The TBM of embodiment 903, wherein the linker region comprises the amino acid sequence of the linker designated L30.

[1702] 934. The TBM of embodiment 903, wherein the linker region comprises the amino acid sequence of the linker designated L31.

[1703] 935. The TBM of embodiment 903, wherein the linker region comprises the amino acid sequence of the linker designated L32.

[1704] 936. The TBM of embodiment 903, wherein the linker region comprises the amino acid sequence of the linker designated L33.

[1705] 937. The TBM of embodiment 903, wherein the linker region comprises the amino acid sequence of the linker designated L34.

[1706] 938. The TBM of embodiment 903, wherein the linker region comprises the amino acid sequence of the linker designated L35.

[1707] 939. The TBM of embodiment 903, wherein the linker region comprises the amino acid sequence of the linker designated L36.

[1708] 940. The TBM of embodiment 903, wherein the linker region comprises the amino acid sequence of the linker designated L37.

[1709] 941. The TBM of embodiment 903, wherein the linker region comprises the amino acid sequence of the linker designated L38.

[1710] 942. The TBM of embodiment 903, wherein the linker region comprises the amino acid sequence of the linker designated L39.

[1711] 943. The TBM of embodiment 903, wherein the linker region comprises the amino acid sequence of the linker designated L40.

[1712] 944. The TBM of embodiment 903, wherein the linker region comprises the amino acid sequence of the linker designated L41.

[1713] 945. The TBM of embodiment 903, wherein the linker region comprises the amino acid sequence of the linker designated L42.

[1714] 946. The TBM of embodiment 903, wherein the linker region comprises the amino acid sequence of the linker designated L43.

[1715] 947. The TBM of embodiment 903, wherein the linker region comprises the amino acid sequence of the linker designated L44.

[1716] 948. The TBM of embodiment 903, wherein the linker region comprises the amino acid sequence of the linker designated L45.

[1717] 949. The TBM of embodiment 903, wherein the linker region comprises the amino acid sequence of the linker designated L46.

[1718] 950. The TBM of embodiment 903, wherein the linker region comprises the amino acid sequence of the linker designated L47.

[1719] 951. The TBM of embodiment 903, wherein the linker region comprises the amino acid sequence of the linker designated L48.

[1720] 952. The TBM of embodiment 903, wherein the linker region comprises the amino acid sequence of the linker designated L49.

[1721] 953. The TBM of embodiment 835, wherein the linker region comprises the amino acid sequence of the linker designated L50.

[1722] 954. The TBM of embodiment 835, wherein the linker region comprises the amino acid sequence of the linker designated L51.

[1723] 955. The TBM of embodiment 835, wherein the linker region comprises the amino acid sequence of the linker designated L52.

[1724] 956. The TBM of embodiment 835, wherein the linker region comprises the amino acid sequence of the linker designated L53.

[1725] 957. The TBM of embodiment 903, wherein the linker region comprises the amino acid sequence of the linker designated L54.

[1726] 958. The TBM of any one of embodiments 1 to 957, which is a trivalent TBM.

[1727] 959. The TBM of embodiment 958, wherein the trivalent TBM has any one of the configurations depicted in FIGS. 1B-1O and 1U-1Z.

[1728] 960. The TBM of embodiment 959, wherein the trivalent TBM has the configuration depicted in FIG. 1B.

[1729] 961. The TBM of embodiment 959, wherein the trivalent TBM has the configuration depicted in FIG. 1C.

[1730] 962. The TBM of embodiment 959, wherein the trivalent TBM has the configuration depicted in FIG. 1D.

[1731] 963. The TBM of embodiment 959, wherein the trivalent TBM has the configuration depicted in FIG. 1E.

[1732] 964. The TBM of embodiment 959, wherein the trivalent TBM has the configuration depicted in FIG. 1F.

[1733] 965. The TBM of embodiment 959, wherein the trivalent TBM has the configuration depicted in FIG. 1G.

[1734] 966. The TBM of embodiment 959, wherein the trivalent TBM has the configuration depicted in FIG. 1H.

[1735] 967. The TBM of embodiment 959, wherein the trivalent TBM has the configuration depicted in FIG. 1I.

[1736] 968. The TBM of embodiment 959, wherein the trivalent TBM has the configuration depicted in FIG. 1J.

[1737] 969. The TBM of embodiment 959, wherein the trivalent TBM has the configuration depicted in FIG. 1K.

[1738] 970. The TBM of embodiment 959, wherein the trivalent TBM has the configuration depicted in FIG. 1L.

[1739] 971. The TBM of embodiment 959, wherein the trivalent TBM has the configuration depicted in FIG. 1M.

[1740] 972. The TBM of embodiment 959, wherein the trivalent TBM has the configuration depicted in FIG. 1N.

[1741] 973. The TBM of embodiment 959, wherein the trivalent TBM has the configuration depicted in FIG. 1O.

[1742] 974. The TBM of embodiment 959, wherein the trivalent TBM has the configuration depicted in FIG. 1V.

[1743] 975. The TBM of embodiment 959, wherein the trivalent TBM has the configuration depicted in FIG. 1W.

[1744] 976. The TBM of embodiment 959, wherein the trivalent TBM has the configuration depicted in FIG. 1X.

[1745] 977. The TBM of embodiment 959, wherein the trivalent TBM has the configuration depicted in FIG. 1Y.

[1746] 978. The TBM of embodiment 959, wherein the trivalent TBM has the configuration depicted in FIG. 1Z.

[1747] 979. The TBM of any one of embodiments 959 to 978, in which the ABMs have the configuration designated as T1.

[1748] 980. The TBM of any one of embodiments 959 to 978, in which the ABMs have the configuration designated as T2.

[1749] 981. The TBM of any one of embodiments 959 to 978, in which the ABMs have the configuration designated as T3.

[1750] 982. The TBM of any one of embodiments 959 to 978, in which the ABMs have the configuration designated as T4.

[1751] 983. The TBM of any one of embodiments 959 to 978, in which the ABMs have the configuration designated as T5.

[1752] 984. The TBM of any one of embodiments 959 to 978, in which the ABMs have the configuration designated as T6.

[1753] 985. The TBM of any one of embodiments 1 to 957, which is a tetravalent TBM.

[1754] 986. The TBM of embodiment 985, wherein the tetravalent TBM has any one of the configurations depicted in FIGS. 1P-1R.

[1755] 987. The TBM of embodiment 986, wherein the tetravalent TBM has the configuration depicted in FIG. 1P.

[1756] 988. The TBM of embodiment 986, wherein the tetravalent TBM has the configuration depicted in FIG. 1Q.

[1757] 989. The TBM of embodiment 986, wherein the tetravalent TBM has the configuration depicted in FIG. 1R.

[1758] 990. The TBM of any one of embodiments 986 to 989, in which the ABMs have any of the configurations designated Tv 1 through Tv 12.

[1759] 991. The TBM of embodiment 990, in which the ABMs have the configuration designated Tv 1.

[1760] 992. The TBM of embodiment 990, in which the ABMs have the configuration designated Tv 2.

[1761] 993. The TBM of embodiment 990, in which the ABMs have the configuration designated Tv 3.

[1762] 994. The TBM of embodiment 990, in which the ABMs have the configuration designated Tv 4.

[1763] 995. The TBM of embodiment 990, in which the ABMs have the configuration designated Tv 5.

[1764] 996. The TBM of embodiment 990, in which the ABMs have the configuration designated Tv 6.

[1765] 997. The TBM of embodiment 990, in which the ABMs have the configuration designated Tv 7.

[1766] 998. The TBM of embodiment 990, in which the ABMs have the configuration designated Tv 8.

[1767] 999. The TBM of embodiment 990, in which the ABMs have the configuration designated Tv 9.

[1768] 1000. The TBM of embodiment 990, in which the ABMs have the configuration designated Tv 10.

[1769] 1001. The TBM of embodiment 990, in which the ABMs have the configuration designated Tv 11.

[1770] 1002. The TBM of embodiment 990, in which the ABMs have the configuration designated Tv 12.

[1771] 1003. The TBM of any one of embodiments 1 to 957, which is a pentavalent TBM.

[1772] 1004. The TBM of embodiment 1003, wherein the pentavalent TBM has the configuration depicted in FIG. 1s.

[1773] 1005. The TBM of embodiment 1004, in which the ABMs have any of the configurations designated Pv 1 through Pv 80.

[1774] 1006. The TBM of embodiment 1005, in which the ABMs have a configuration selected from any one of the configurations designated Pv 1 through Pv 10.

[1775] 1007. The TBM of embodiment 1005, in which the ABMs have a configuration selected from any one of the configurations designated Pv 11 through Pv 20.

[1776] 1008. The TBM of embodiment 1005, in which the ABMs have a configuration selected from any one of the configurations designated Pv 21 through Pv 30.

[1777] 1009. The TBM of embodiment 1005, in which the ABMs have a configuration selected from any one of the configurations designated Pv 31 through Pv 40.

[1778] 1010. The TBM of embodiment 1005, in which the ABMs have a configuration selected from any one of the configurations designated Pv 41 through Pv 50.

[1779] 1011. The TBM of embodiment 1005, in which the ABMs have a configuration selected from any one of the configurations designated Pv 51 through Pv 60.

[1780] 1012. The TBM of embodiment 1005, in which the ABMs have a configuration selected from any one of the configurations designated Pv 61 through Pv 70.

[1781] 1013. The TBM of embodiment 1005, in which the ABMs have a configuration selected from any one of the configurations designated Pv 71 through Pv 80.

[1782] 1014. The TBM of any one of embodiments 1 to 957, which is a hexavalent TBM.

[1783] 1015. The TBM of embodiment 1014, wherein the hexavalent TBM has the configuration depicted in FIG. 1T or FIG. 1U.

[1784] 1016. The TBM of embodiment 1015, wherein the hexavalent TBM has the configuration depicted in FIG. 1T.

[1785] 1017. The TBM of embodiment 1015, wherein the hexavalent TBM has the configuration depicted in FIG. 1U.

[1786] 1018. The TBM of any one of embodiments 1015 to 1017, in which the ABMs have any of the configurations designated Hv 1 through Hv 240.

[1787] 1019. The TBM of embodiment 1018, in which the ABMs have a configuration selected from any one of the configurations designated Hv 1 through Hv 10.

[1788] 1020. The TBM of embodiment 1018, in which the ABMs have a configuration selected from any one of the configurations designated Hv 11 through Hv 20.

[1789] 1021. The TBM of embodiment 1018, in which the ABMs have a configuration selected from any one of the configurations designated Hv 21 through Hv 30.

[1790] 1022. The TBM of embodiment 1018, in which the ABMs have a configuration selected from any one of the configurations designated Hv 31 through Hv 40.

[1791] 1023. The TBM of embodiment 1018, in which the ABMs have a configuration selected from any one of the configurations designated Hv 41 through Hv 50.

[1792] 1024. The TBM of embodiment 1018, in which the ABMs have a configuration selected from any one of the configurations designated Hv 51 through Hv 60.

[1793] 1025. The TBM of embodiment 1018, in which the ABMs have a configuration selected from any one of the configurations designated Hv 61 through Hv 70.

[1794] 1026. The TBM of embodiment 1018, in which the ABMs have a configuration selected from any one of the configurations designated Hv 71 through Hv 80.

[1795] 1027. The TBM of embodiment 1018, in which the ABMs have a configuration selected from any one of the configurations designated Hv 81 through Hv 90.

[1796] 1028. The TBM of embodiment 1018, in which the ABMs have a configuration selected from any one of the configurations designated Hv 91 through Hv 100.

[1797] 1029. The TBM of embodiment 1018, in which the ABMs have a configuration selected from any one of the configurations designated Hv 101 through Hv 110.

[1798] 1030. The TBM of embodiment 1018, in which the ABMs have a configuration selected from any one of the configurations designated Hv 111 through Hv 120.

[1799] 1031. The TBM of embodiment 1018, in which the ABMs have a configuration selected from any one of the configurations designated Hv 121 through Hv 130.

[1800] 1032. The TBM of embodiment 1018, in which the ABMs have a configuration selected from any one of the configurations designated Hv 131 through Hv 140.

[1801] 1033. The TBM of embodiment 1018, in which the ABMs have a configuration selected from any one of the configurations designated Hv 141 through Hv 150.

[1802] 1034. The TBM of embodiment 1018, in which the ABMs have a configuration selected from any one of the configurations designated Hv 151 through Hv 160.

[1803] 1035. The TBM of embodiment 1018, in which the ABMs have a configuration selected from any one of the configurations designated Hv 161 through Hv 70.

[1804] 1036. The TBM of embodiment 1018, in which the ABMs have a configuration selected from any one of the configurations designated Hv 171 through Hv 80.

[1805] 1037. The TBM of embodiment 1018, in which the ABMs have a configuration selected from any one of the configurations designated Hv 181 through Hv 90.

[1806] 1038. The TBM of embodiment 1018, in which the ABMs have a configuration selected from any one of the configurations designated Hv 191 through Hv 200.

[1807] 1039. The TBM of embodiment 1018, in which the ABMs have a configuration selected from any one of the configurations designated Hv 201 through Hv 210.

[1808] 1040. The TBM of embodiment 1018, in which the ABMs have a configuration selected from any one of the configurations designated Hv 211 through Hv 220.

[1809] 1041. The TBM of embodiment 1018, in which the ABMs have a configuration selected from any one of the configurations designated Hv 221 through Hv 230.

[1810] 1042. The TBM of embodiment 1018, in which the ABMs have a configuration selected from any one of the configurations designated Hv 231 through Hv 240.

[1811] 1043. The TBM of any one of embodiments 1 to 453 and 575 to 1042, wherein any one, any two, or all three of ABM1, ABM2 and ABM3 has cross-species reactivity.

[1812] 1044. The TBM of embodiment 1043, wherein ABM1 further binds specifically to CD2 in one or more non-human mammalian species.

[1813] 1045. The TBM of embodiment 1043 or embodiment 1044, wherein ABM2 further binds specifically to the component of the TCR complex in one or more non-human mammalian species.

[1814] 1046. The TBM of any one of embodiments 1043 to 1045, wherein ABM3 further binds specifically to the TAA in one or more non-human mammalian species.

[1815] 1047. The TBM of any one of embodiments 1043 to 1046, wherein the one or more non-human mammalian species comprises one or more non-human primate species.

[1816] 1048. The TBM of embodiment 1047, wherein the one or more non-human primate species comprises Macaca fascicularis.

[1817] 1049. The TBM of embodiment 1047, wherein the one or more non-human primate species comprises Macaca mulatta.

[1818] 1050. The TBM of embodiment 1047, wherein the one or more non-human primate species comprises Macaca nemestrina.

[1819] 1051. The TBM of any one of embodiments 1043 to 1046, wherein the one or more non-human mammalian species comprises Mus musculus.

[1820] 1052. The TBM of any one of embodiments 1 to 468 and 575 to 1051, wherein any one, any two, or all three of ABM1, ABM2 and ABM3 does not have cross-species reactivity.

[1821] 1053. The TBM of any one of embodiments 575 to 1052, which has been recombinantly produced, optionally in a mammalian host cell, which is optionally selected from Vero cells, HeLa cells, COS cells, CHO cells, HEK293 cells, BHK cells and MDCKII cells.

[1822] 1054. A conjugate comprising the TBM of any one of embodiments 1 to 468 or 575 to 1053 and an agent, optionally a therapeutic agent, a diagnostic agent, a masking moiety, a cleavable moiety, or any combination thereof.

[1823] 1055. The conjugate of embodiment 1054, wherein the agent is a cytotoxic or cytostatic agent.

[1824] 1056. The conjugate of embodiment 1055, wherein the agent is any of the agents described in Section 4.9.

[1825] 1057. The conjugate of embodiment 1055 or 1056, wherein the agent is any of the agents described in Section 4.9.1.

[1826] 1058. The conjugate of any one of embodiments 1054 to 1057, wherein the TBM is conjugated to a radionuclide.

[1827] 1059. The conjugate of any one of embodiments 1054 to 1057, wherein the TBM is conjugated to an alkylating agent.

[1828] 1060. The conjugate of any one of embodiments 1054 to 1057, wherein the TBM is conjugated to a topoisomerase inhibitor, which is optionally a topoisomerase I inhibitor or a topoisomerase II inhibitor.

[1829] 1061. The conjugate of any one of embodiments 1054 to 1057, wherein the TBM is conjugated to a DNA damaging agent.

[1830] 1062. The conjugate of any one of embodiments 1054 to 1057, wherein the TBM is conjugated to a DNA intercalating agent, optionally a groove binding agent such as a minor groove binding agent.

[1831] 1063. The conjugate of any one of embodiments 1054 to 1057, wherein the TBM is conjugated to a RNA/DNA antimetabolite.

[1832] 1064. The conjugate of any one of embodiments 1054 to 1057, wherein the TBM is conjugated to a kinase inhibitor.

[1833] 1065. The conjugate of any one of embodiments 1054 to 1057, wherein the TBM is conjugated to a protein synthesis inhibitor.

[1834] 1066. The conjugate of any one of embodiments 1054 to 1057, wherein the TBM is conjugated to a histone deacetylase (HDAC) inhibitor.

[1835] 1067. The conjugate of any one of embodiments 1054 to 1057, wherein the TBM is conjugated to a mitochondrial. Inhibitor, which is optionally an inhibitor of a phosphoryl transfer reaction in mitochondria.

[1836] 1068. The conjugate of any one of embodiments 1054 to 1057, wherein the TBM is conjugated to an antimitotic agent.

[1837] 1069. The conjugate of any one of embodiments 1054 to 1057, wherein the TBM is conjugated to a maytansinoid.

[1838] 1070. The conjugate of any one of embodiments 1054 to 1057, wherein the TBM is conjugated to a kinesin inhibitor.

[1839] 1071. The conjugate of any one of embodiments 1054 to 1057, wherein the TBM is conjugated to a kinesin-like protein KIF11 inhibitor.

[1840] 1072. The conjugate of any one of embodiments 1054 to 1057, wherein the TBM is conjugated to a V-ATPase (vacuolar-type H+-ATPase) inhibitor.

[1841] 1073. The conjugate of any one of embodiments 1054 to 1057, wherein the TBM is conjugated to a pro-apoptotic agent.

[1842] 1074. The conjugate of any one of embodiments 1054 to 1057, wherein the TBM is conjugated to a Bcl2 (B-cell lymphoma 2) inhibitor.

[1843] 1075. The conjugate of any one of embodiments 1054 to 1057, wherein the TBM is conjugated to an MCL1 (myeloid cell leukemia 1) inhibitor.

[1844] 1076. The conjugate of any one of embodiments 1054 to 1057, wherein the TBM is conjugated to a HSP90 (heat shock protein 90) inhibitor.

[1845] 1077. The conjugate of any one of embodiments 1054 to 1057, wherein the TBM is conjugated to an IAP (inhibitor of apoptosis) inhibitor.

[1846] 1078. The conjugate of any one of embodiments 1054 to 1057, wherein the TBM is conjugated to an mTOR (mechanistic target of rapamycin) inhibitor.

[1847] 1079. The conjugate of any one of embodiments 1054 to 1057, wherein the TBM is conjugated to a microtubule stabilizer.

[1848] 1080. The conjugate of any one of embodiments 1054 to 1057, wherein the TBM is conjugated to a microtubule destabilizer.

[1849] 1081. The conjugate of any one of embodiments 1054 to 1057, wherein the TBM is conjugated to an auristatin.

[1850] 1082. The conjugate of any one of embodiments 1054 to 1057, wherein the TBM is conjugated to a dolastatin.

[1851] 1083. The conjugate of any one of embodiments 1054 to 1057, wherein the TBM is conjugated to a MetAP (methionine aminopeptidase).

[1852] 1084. The conjugate of any one of embodiments 1054 to 1057, wherein the TBM is conjugated to a CRM1 (chromosomal maintenance 1) inhibitor.

[1853] 1085. The conjugate of any one of embodiments 1054 to 1057, wherein the TBM is conjugated to a DPPIV (dipeptidyl peptidase IV) inhibitor.

[1854] 1086. The conjugate of any one of embodiments 1054 to 1057, wherein the TBM is conjugated to a proteasome inhibitor.

[1855] 1087. The conjugate of any one of embodiments 1054 to 1057, wherein the TBM is conjugated to a protein synthesis inhibitor.

[1856] 1088. The conjugate of any one of embodiments 1054 to 1057, wherein the TBM is conjugated to a CDK2 (cyclin-dependent kinase 2) inhibitor.

[1857] 1089. The conjugate of any one of embodiments 1054 to 1057, wherein the TBM is conjugated to a CDK9 (cyclin-dependent kinase 9) inhibitor.

[1858] 1090. The conjugate of any one of embodiments 1054 to 1057, wherein the TBM is conjugated to a RNA polymerase inhibitor.

[1859] 1091. The conjugate of any one of embodiments 1054 to 1057, wherein the TBM is conjugated to a DHFR (dihydrofolate reductase) inhibitor.

[1860] 1092. The conjugate of any one of embodiments 1054 to 1057, wherein the agent is attached to the TBM with a linker, which is optionally a cleavable linker or a non-cleavabe linker, e.g.

[1861] 1093. The conjugate of any one of embodiments 1054 to 1092, wherein the cytotoxic or cytostatic agent is conjugated to the TBM via a linker as described in Section 4.9.2.

[1862] 1094. A preparation of TBMs comprising a plurality of TBM molecules according to any one of embodiments 575 to 1053 or a plurality of conjugate molecules according to any one of embodiments 1054 to 1093, optionally wherein the plurality comprises at least 100, at least 1,000, at least 10,000, or at least 100,000 TBM molecules or conjugate molecules.

[1863] 1095. The preparation of embodiment 1094, wherein at least 50% of the trispecific molecules in the preparation have the same primary amino acid sequence.

[1864] 1096. The preparation of embodiment 1094, wherein at least 60% of the trispecific molecules in the preparation have the same primary amino acid sequence.

[1865] 1097. The preparation of embodiment 1094, wherein at least 70% of the trispecific molecules in the preparation have the same primary amino acid sequence.

[1866] 1098. The preparation of embodiment 1094, wherein at least 80% of the trispecific molecules in the preparation have the same primary amino acid sequence.

[1867] 1099. The preparation of embodiment 1094, wherein at least 90% of the trispecific molecules in the preparation have the same primary amino acid sequence.

[1868] 1100. The preparation of embodiment 1094, wherein at least 95% of the trispecific molecules in the preparation have the same primary amino acid sequence.

[1869] 1101. The preparation of embodiment 1094, wherein at least 97% of the trispecific molecules in the preparation have the same primary amino acid sequence.

[1870] 1102. The preparation of embodiment 1094, wherein at least 98% of the trispecific molecules in the preparation have the same primary amino acid sequence.

[1871] 1103. The preparation of embodiment 1094, wherein at least 99% of the trispecific molecules in the preparation have the same primary amino acid sequence.

[1872] 1104. The preparation of embodiment 1094, wherein 50% to 95% of the trispecific molecules in the preparation have the same primary amino acid sequence.

[1873] 1105. The preparation of embodiment 1094, wherein 50% to 80% of the trispecific molecules in the preparation have the same primary amino acid sequence.

[1874] 1106. The preparation of embodiment 1094, wherein 50% to 70% of the trispecific molecules in the preparation have the same primary amino acid sequence.

[1875] 1107. The preparation of embodiment 1094, wherein 60% to 95% of the trispecific molecules in the preparation have the same primary amino acid sequence.

[1876] 1108. The preparation of embodiment 1094, wherein 60% to 80% of the trispecific molecules in the preparation have the same primary amino acid sequence.

[1877] 1109. The preparation of embodiment 1094, wherein 60% to 70% of the trispecific molecules in the preparation have the same primary amino acid sequence.

[1878] 1110. The preparation of embodiment 1094, wherein 70% to 95% of the trispecific molecules in the preparation have the same primary amino acid sequence.

[1879] 1111. The preparation of embodiment 1094, wherein 70% to 80% of the trispecific molecules in the preparation have the same primary amino acid sequence.

[1880] 1112. The preparation of embodiment 1094, wherein 80% to 95% of the trispecific molecules in the preparation have the same primary amino acid sequence.

[1881] 1113. The preparation of embodiment 1094, wherein 95% to 99% of the trispecific molecules in the preparation have the same primary amino acid sequence.

[1882] 1114. The preparation of any one of embodiments 1094 to 1113, wherein at least 50% of the trispecific molecules in the preparation have the same interchain crosslinks.

[1883] 1115. The preparation of any one of embodiments 1094 to 1113, wherein at least 60% of the trispecific molecules in the preparation have the same interchain crosslinks.

[1884] 1116. The preparation of any one of embodiments 1094 to 1113, wherein at least 70% of the trispecific molecules in the preparation have the same interchain crosslinks.

[1885] 1117. The preparation of any one of embodiments 1094 to 1113, wherein at least 80% of the trispecific molecules in the preparation have the same interchain crosslinks.

[1886] 1118. The preparation of any one of embodiments 1094 to 1113, wherein at least 90% of the trispecific molecules in the preparation have the same interchain crosslinks.

[1887] 1119. The preparation of any one of embodiments 1094 to 1113, wherein at least 95% of the trispecific molecules in the preparation have the same interchain crosslinks.

[1888] 1120. The preparation of any one of embodiments 1094 to 1113, wherein at least 97% of the trispecific molecules in the preparation have the same interchain crosslinks.

[1889] 1121. The preparation of any one of embodiments 1094 to 1113, wherein at least 98% of the trispecific molecules in the preparation have the same interchain crosslinks.

[1890] 1122. The preparation of any one of embodiments 1094 to 1113, wherein at least 99% of the trispecific molecules in the preparation have the same interchain crosslinks.

[1891] 1123. The preparation of any one of embodiments 1094 to 1113, wherein 50% to 95% of the trispecific molecules in the preparation have the same interchain crosslinks.

[1892] 1124. The preparation of any one of embodiments 1094 to 1113, wherein 50% to 80% of the trispecific molecules in the preparation have the same interchain crosslinks.

[1893] 1125. The preparation of any one of embodiments 1094 to 1113, wherein 50% to 70% of the trispecific molecules in the preparation have the same interchain crosslinks.

[1894] 1126. The preparation of any one of embodiments 1094 to 1113, wherein 60% to 95% of the trispecific molecules in the preparation have the same interchain crosslinks.

[1895] 1127. The preparation of any one of embodiments 1094 to 1113, wherein 60% to 80% of the trispecific molecules in the preparation have the same interchain crosslinks.

[1896] 1128. The preparation of any one of embodiments 1094 to 1113, wherein 60% to 70% of the trispecific molecules in the preparation have the same interchain crosslinks.

[1897] 1129. The preparation of any one of embodiments 1094 to 1113, wherein 70% to 95% of the trispecific molecules in the preparation have the same interchain crosslinks.

[1898] 1130. The preparation of any one of embodiments 1094 to 1113, wherein 70% to 80% of the trispecific molecules in the preparation have the same interchain crosslinks.

[1899] 1131. The preparation of any one of embodiments 1094 to 1113, wherein 80% to 95% of the trispecific molecules in the preparation have the same interchain crosslinks.

[1900] 1132. The preparation of any one of embodiments 1094 to 1113, wherein 95% to 99% of the trispecific molecules in the preparation have the same interchain crosslinks.

[1901] 1133. The preparation of any one of embodiments 1094 to 1132, wherein at least 50% of the trispecific molecules in the preparation have the same ABM1:ABM2:ABM3 ratio.

[1902] 1134. The preparation of any one of embodiments 1094 to 1132, wherein at least 60% of the trispecific molecules in the preparation have the same ABM1:ABM2:ABM3 ratio.

[1903] 1135. The preparation of any one of embodiments 1094 to 1132, wherein at least 70% of the trispecific molecules in the preparation have the same ABM1:ABM2:ABM3 ratio.

[1904] 1136. The preparation of any one of embodiments 1094 to 1132, wherein at least 80% of the trispecific molecules in the preparation have the same ABM1:ABM2:ABM3 ratio.

[1905] 1137. The preparation of any one of embodiments 1094 to 1132, wherein at least 90% of the trispecific molecules in the preparation have the same ABM1:ABM2:ABM3 ratio.

[1906] 1138. The preparation of any one of embodiments 1094 to 1132, wherein at least 95% of the trispecific molecules in the preparation have the same ABM1:ABM2:ABM3 ratio.

[1907] 1139. The preparation of any one of embodiments 1094 to 1132, wherein at least 97% of the trispecific molecules in the preparation have the same ABM1:ABM2:ABM3 ratio.

[1908] 1140. The preparation of any one of embodiments 1094 to 1132, wherein at least 98% of the trispecific molecules in the preparation have the same ABM1:ABM2:ABM3 ratio.

[1909] 1141. The preparation of any one of embodiments 1094 to 1132, wherein at least 99% of the trispecific molecules in the preparation have the same ABM1:ABM2:ABM3 ratio.

[1910] 1142. The preparation of any one of embodiments 1094 to 1132, wherein 50% to 95% of the trispecific molecules in the preparation have the same ABM1:ABM2:ABM3 ratio.

[1911] 1143. The preparation of any one of embodiments 1094 to 1132, wherein 50% to 80% of the trispecific molecules in the preparation have the same ABM1:ABM2:ABM3 ratio.

[1912] 1144. The preparation of any one of embodiments 1094 to 1132, wherein 50% to 70% of the trispecific molecules in the preparation have the same ABM1:ABM2:ABM3 ratio.

[1913] 1145. The preparation of any one of embodiments 1094 to 1132, wherein 60% to 95% of the trispecific molecules in the preparation have the same ABM1:ABM2:ABM3 ratio.

[1914] 1146. The preparation of any one of embodiments 1094 to 1132, wherein 60% to 80% of the trispecific molecules in the preparation have the same ABM1:ABM2:ABM3 ratio.

[1915] 1147. The preparation of any one of embodiments 1094 to 1132, wherein 60% to 70% of the trispecific molecules in the preparation have the same ABM1:ABM2:ABM3 ratio.

[1916] 1148. The preparation of any one of embodiments 1094 to 1132, wherein 70% to 95% of the trispecific molecules in the preparation have the same ABM1:ABM2:ABM3 ratio.

[1917] 1149. The preparation of any one of embodiments 1094 to 1132, wherein 70% to 80% of the trispecific molecules in the preparation have the same ABM1:ABM2:ABM3 ratio.

[1918] 1150. The preparation of any one of embodiments 1094 to 1132, wherein 80% to 95% of the trispecific molecules in the preparation have the same ABM1:ABM2:ABM3 ratio.

[1919] 1151. The preparation of any one of embodiments 1094 to 1132, wherein 95% to 99% of the trispecific molecules in the preparation have the same ABM1:ABM2:ABM3 ratio.

[1920] 1152. A pharmaceutical composition comprising the TBM of any one of embodiments 1 to 468 or 575 to 1053, the conjugate of any one of embodiments 1054 to 1093, or the preparation of any one of embodiments 1094 to 1151, and an excipient.

[1921] 1153. A method of treating a subject with cancer, comprising administering to a subject suffering from cancer an effective amount of the TBM of any one of embodiments 1 to 468 or 575 to 1053, the conjugate of any one of embodiments 1054 to 1093, the preparation of any one of embodiments 1094 to 1151, or the pharmaceutical composition of embodiment 1152.

[1922] 1154. The method of embodiment 1153, wherein the cancer is selected from HER2+ cancer, acute lymphoblastic leukemia (ALL), acute myeloid leukemia (AML), adrenocortical carcinoma, anal cancer, appendix cancer, astrocytoma, basal cell carcinoma, brain tumor, bile duct cancer, bladder cancer, bone cancer, breast cancer, bronchial tumor, Burkitt Lymphoma, carcinoma of unknown primary origin, cardiac tumor, cervical cancer, chordoma, chronic lymphocytic leukemia (CLL), chronic myelogenous leukemia (CML), chronic myeloproliferative neoplasm, colon cancer, colorectal cancer, craniopharyngioma, cutaneous T-cell lymphoma, ductal carcinoma, embryonal tumor, endometrial cancer, ependymoma, esophageal cancer, esthesioneuroblastoma, fibrous histiocytoma, Ewing sarcoma, eye cancer, germ cell tumor, gallbladder cancer, gastric cancer, gastrointestinal carcinoid tumor, gastrointestinal stromal tumor, gestational trophoblastic disease, glioma, head and neck cancer, hairy cell leukemia, hepatocellular cancer, histiocytosis, Hodgkin lymphoma, hypopharyngeal cancer, intraocular melanoma, islet cell tumor, Kaposi sarcoma, kidney cancer, Langerhans cell histiocytosis, laryngeal cancer, leukemia, lip and oral cavity cancer, liver cancer, lobular carcinoma in situ, lung cancer, lymphoma, macroglobulinemia, malignant fibrous histiocytoma, melanoma, Merkel cell carcinoma, mesothelioma, metastatic squamous neck cancer with occult primary, midline tract carcinoma involving NUT gene, mouth cancer, multiple endocrine neoplasia syndrome, multiple myeloma, mycosis fungoides, myelodysplastic syndrome, myelodysplastic/myeloproliferative neoplasm, nasal cavity and para-nasal sinus cancer, nasopharyngeal cancer, neuroblastoma, non-Hodgkin lymphoma, non-small cell lung cancer, oropharyngeal cancer, osteosarcoma, ovarian cancer, pancreatic cancer, papillomatosis, paraganglioma, parathyroid cancer, penile cancer, pharyngeal cancer, pheochromocytomas, pituitary tumor, pleuropulmonary blastoma, primary central nervous system lymphoma, prostate cancer, rectal cancer, renal cell cancer, renal pelvis and ureter cancer, retinoblastoma, rhabdoid tumor, salivary gland cancer, Sezary syndrome, skin cancer, small cell lung cancer, small intestine cancer, soft tissue sarcoma, spinal cord tumor, stomach cancer, T-cell lymphoma, teratoid tumor, testicular cancer, throat cancer, thymoma and thymic carcinoma, thyroid cancer, urethral cancer, uterine cancer, vaginal cancer, vulvar cancer, and Wilms tumor.

[1923] 1155. The method of any of embodiment 1153 or embodiment 1154, wherein the TAA and indication are any of the TAA-indication combinations set forth in Table 14.

[1924] 1156. The method of any one of embodiments 1153 to 1155, further comprising administering at least one additional agent to the subject.

[1925] 1157. The method of embodiment 1156, wherein the additional agent is a chemotherapeutic agent.

[1926] 1158. The method of embodiment 1156 or embodiment 1157, wherein the additional agent is an anthracycline.

[1927] 1159. The method of embodiment 1156 or embodiment 1157, wherein the additional agent is a vinca alkaloid.

[1928] 1160. The method of embodiment 1156 or embodiment 1157, wherein the additional agent is an alkylating agent.

[1929] 1161. The method of embodiment 1156 or embodiment 1157, wherein the additional agent is an immune cell antibody.

[1930] 1162. The method of embodiment 1156 or embodiment 1157, wherein the additional agent is an antimetabolite.

[1931] 1163. The method of embodiment 1156 or embodiment 1157, wherein the additional agent is an adenosine deaminase inhibitor

[1932] 1164. The method of embodiment 1156 or embodiment 1157, wherein the additional agent is an mTOR inhibitor.

[1933] 1165. The method of embodiment 1156 or embodiment 1157, wherein the additional agent is a TNFR glucocorticoid induced TNFR related protein (GITR) agonist.

[1934] 1166. The method of embodiment 1156 or embodiment 1157, wherein the additional agent is a proteasome inhibitor.

[1935] 1167. The method of embodiment 1156 or embodiment 1157, wherein the additional agent is an immunomodulatory.

[1936] 1168. The method of embodiment 1156 or embodiment 1157, wherein the additional agent is a thalidomide derivative.

[1937] 1169. A nucleic acid or plurality of nucleic acids encoding the TBM of any one of embodiments 1 to 468 and 575 to 1053.

[1938] 1170. The nucleic acid or plurality of nucleic acids of embodiment 1169 which is a DNA (are DNAs).

[1939] 1171. The nucleic acid or plurality of nucleic acids of embodiment 1170 which are in the form of one or more vectors, optionally expression vectors.

[1940] 1172. The nucleic acid or plurality of nucleic acids of embodiment 1169 which is a mRNA (are mRNAs).

[1941] 1173. A cell engineered to express the TBM of any one of embodiments 1 to 468 and 575 to 1053.

[1942] 1174. A cell transfected with one or more expression vectors comprising one or more nucleic acid sequences encoding the TBM of any one of embodiments 1 to 468 and 575 to 1053 under the control of one or more promoters.

[1943] 1175. The cell of embodiment 1173 or embodiment 1174, wherein expression of the TBM is under the control of one or more inducible promoters.

[1944] 1176. The cell of any one of embodiments 1173 to 1175, wherein the TBM is produced in secretable form.

[1945] 1177. A method of producing a TBM, comprising:
[1946] (a) culturing the cell of any one of embodiments 1173 to 1177 in conditions under which the TBM is expressed; and
[1947] (b) recovering the TBM from the cell culture.

[1948] 1178. An anti-CD3 antibody or antigen-binding fragment thereof, comprising the CDR sequences of CD3-21.

[1949] 1179. The anti-CD3 antibody or antigen-binding fragment thereof of embodiment 1178, wherein the CDRs are defined by Kabat numbering, as set forth in Table 7B.

[1950] 1180. The anti-CD3 antibody or antigen-binding fragment thereof of embodiment 1178, wherein the CDRs are defined by Chothia numbering, as set forth in Table 7C.

[1951] 1181. The anti-CD3 antibody or antigen-binding fragment thereof of embodiment 1178, which comprises the heavy and light chain variable sequences of CD3-21 as set forth in Table 7A.

[1952] 1182. The anti-CD3 antibody or antigen-binding fragment thereof of any one of embodiments 1178 to 1181, which is in the form of an antibody.

[1953] 1183. The anti-CD3 antibody or antigen-binding fragment thereof of any one of embodiment 1182, which is in the form of a monospecific antibody.

[1954] 1184. The anti-CD3 antibody or antigen-binding fragment thereof of any one of embodiment 1182, which is in the form of a multispecific antibody.

[1955] 1185. The anti-CD3 antibody or antigen-binding fragment thereof of any one of embodiment 1182, which is in the form of a trispecfic antibody.

[1956] 1186. The anti-CD3 antibody or antigen-binding fragment thereof of any one of embodiments 1178 to 1181, which is in the form of an antibody fragment.

[1957] 1187. The anti-CD3 antibody or antigen-binding fragment thereof of embodiment 1186, which is in the form of a scFV.

[1958] 1188. The anti-CD3 antibody or antigen-binding fragment thereof of embodiment 1187, comprising the CD3-21 scFv sequence set forth in Table 7A.

[1959] All publications, patents, patent applications and other documents cited in this application are hereby incorporated by reference in their entireties for all purposes to the same extent as if each individual publication, patent, patent application or other document were individually indicated to be incorporated by reference for all purposes. In the event that there is an inconsistency between the teachings of one or more of the references incorporated herein and the present disclosure, the teachings of the present specification are intended.

What is claimed is:

1. A trispecific binding molecule (TBM), comprising:
(a) an antigen-binding module 1 (ABM1) that binds specifically to human CD2;
(b) an antigen-binding module 2 (ABM2) that binds specifically to a component of a human T-cell receptor (TCR) complex; and
(c) an antigen-binding module 3 (ABM3) that binds specifically to a human tumor-associated antigen (TAA),

2. The TBM of claim 1, wherein each antigen-binding module is capable of binding its respective target at the same time as each of the other antigen-binding modules is bound to its respective target.

3. The TBM of claim 1, wherein ABM1 is:
(a) an immunoglobulin scaffold-based ABM which is optionally an anti-CD2 antibody, an antibody fragment, an scFv, a dsFv, a Fv, a Fab, an scFab, a (Fab′)2, a single domain antibody (SDAB), a VH or VL domain, or a camelid VHH domain; or
(b) a non-immunoglobulin scaffold-based ABM which is optionally a Kunitz domain, an Adnexin, an Affibody, a DARPin, an Avimer, an Anticalin, a Lipocalin, a Centyrin, a Versabody, a Knottin, an Adnectin, a Pronectin, an Affitin/Nanofitin, an Affilin, an Atrimer/Tetranectin, a bicyclic peptide, a cys-knot, a Fn3 scaffold, an Obody, a Tn3, an Aan Affimer, BD, an Adhiron, a Duocalin, an Alphabody, an Armadillo Repeat Protein, a Repebody, or a Fynomer.

4. The TBM of claim 3, wherein ABM1 is an scFv or a Fab.

5. The TBM of claim 3, wherein ABM1 comprises any of the binding sequences set forth in Table 9.

6. The TBM of claim 1, wherein ABM1 comprises a receptor binding domain of a CD2 ligand.

7. The TBM of claim 1, wherein ABM1 is a CD58 moiety.

8. The TBM of claim 7, wherein ABM1 comprises amino acids 1-94 of CD58-2.

9. The TBM of claim 1, wherein ABM1 is a CD48 moiety.

10. The TBM of claim 1, wherein the component of a human TCR complex is CD3.

11. The TBM of claim 10, wherein ABM2 is:
(a) an immunoglobulin scaffold-based ABM which is optionally an anti-CD3 antibody, an antibody fragment, an scFv, a dsFv, a Fv, a Fab, an scFab, a (Fab′)2, a single domain antibody (SDAB), a VH or VL domain, or a camelid VHH domain; or
(b) a non-immunoglobulin scaffold-based ABM which is optionally a Kunitz domain, an Adnexin, an Affibody, a DARPin, an Avimer, an Anticalin, a Lipocalin, a Centyrin, a Versabody, a Knottin, an Adnectin, a Pronectin, an Affitin/Nanofitin, an Affilin, an Atrimer/Tetranectin, a bicyclic peptide, a cys-knot, a Fn3 scaffold, an Obody, a Tn3, an Aan Affimer, BD, an Adhiron, a Duocalin, an Alphabody, an Armadillo Repeat Protein, a Repebody, or a Fynomer.

12. The TBM of claim 11, wherein ABM2 is an scFv or Fab.

13. The TBM of claim 11, wherein ABM2 comprises any of the binding sequences set forth in any one of Tables 7A through 7D.

14. The TBM of claim 13, wherein ABM2 comprises the VH and VL sequences of CD3-21 as set forth in Table 7A.

15. The TBM of claim 1, wherein the component of a human TCR complex is the alpha subunit of the TCR.

16. The TBM of claim 15, wherein ABM2 is an anti-CD3 antibody, an antibody fragment, an scFv, a Fv, a dsFv, a Fab, an scFab, a (Fab′)2, a single domain antibody (SDAB), a VH or VL domain, a camelid VHH domain, a DARPins, an Avimer, an Anticalin/Lipocalin, a Centyrin, a Versabody, a Duocalin or a Fynomer.

17. The TBM of claim 1, wherein if TAA is a receptor, ABM3 comprises a receptor binding domain of a ligand of the receptor, and if TAA is a ligand, ABM3 comprises a ligand binding domain of a receptor of the ligand.

18. The TBM of claim 1, wherein ABM3 is:
(a) an immunoglobulin scaffold-based ABM which is optionally an anti-TAA antibody, an antibody fragment, an scFv, a dsFv, a Fv, a Fab, an scFab, a (Fab′)2, a single domain antibody (SDAB), a VH or VL domain, or a camelid VHH domain; or
(b) a non-immunoglobulin scaffold-based ABM which is optionally a Kunitz domain, an Adnexin, an Affibody, a DARPin, an Avimer, an Anticalin, a Lipocalin, a Centyrin, a Versabody, a Knottin, an Adnectin, a Pronectin, an Affitin/Nanofitin, an Affilin, an Atrimer/Tetranectin, a bicyclic peptide, a cys-knot, a Fn3 scaffold, an Obody, a Tn3, an Aan Affimer, BD, an Adhiron, a Duocalin, an Alphabody, an Armadillo Repeat Protein, a Repebody, or a Fynomer.

19. The TBM of claim 18, wherein the TAA is TSHR, CD171, CS-1, CLL-1, GD3, Tn Ag, FLT3, CD38, CD44v6, B7H3, KIT, IL-13Ra2, IL-11Ra, PSCA, PRSS21, VEGFR2, LewisY, CD24, PDGFR-beta, SSEA-4, MUC1, EGFR, EGFRvIII, NCAM, CAIX, LMP2, EphA2, fucosyl GM1, sLe, GM3, TGS5, HMWMAA, o-acetyl-GD2, GD2, folate receptor alpha, folate receptor beta, TEM1/CD248, TEM7R, CLDN6, GPRC5D, CXORF61, CD97, CD179a, ALK, polysialic acid, PLAC1, GloboH, NY-BR-1, UPK2, HAVCR1, ADRB3, PANX3, GPR20, LY6K, OR51E2, TAARP, WT1, ETV6-AML, sperm protein 17, XAGE1, Tie 2, MAD-CT-1, MAD-CT-2, Fos-related antigen 1, p53 mutant, hTERT, sarcoma translocation breakpoints, ML-IAP, ERG (TMPRSS2 ETS fusion gene), NA17, PAX3, Androgen receptor, Cyclin B1, MYCN, RhoC, CYP1B1, BORIS, SART3, PAX5, OY-TES1, LCK, AKAP-4, SSX2, CD79a, CD79b, CD72, LAIR1, FCAR, LILRA2, CD300LF, CLEC12A, BST2, EMR2, LY75, GPC3, FCRL5, IGLL1, CD19, CD20, CD30, ERBB2, ROR1, FLT3, TAAG72, CD22, CD33, GD2, BCMA, gp100Tn, FAP, tyrosinase, EPCAM, CEA, Igf-I receptor, Cadherin17, CD32b, GPNMB, GPR64, HER3, LRP6, LYPD8, NKG2D, SLC34A2, SLC39A6, SLITRK6, TACSTD2, or EphB2.

20. The TBM of claim 18, wherein the TAA is BCMA.

21. The TBM of claim 20, wherein ABM3 comprises any of the binding sequences set forth in any one of Tables 12A, 12B, 12C, 12D, 12E, or 12F.

22. The TBM of claim 18, wherein the TAA is CD19.

23. The TBM of claim 22, wherein ABM3 comprises any of the binding sequences set forth Table 13.

24. The TBM of claim 18, wherein the TAA is Her2.

25. The TBM of claim 18, wherein the TAA is mesothelin.

26. The TBM of claim 18, wherein ABM3 is an scFv or a Fab.

27. The TBM of claim 1, which is a trivalent TBM.

28. The TBM of claim 27, wherein the trivalent TBM has any one of the configurations depicted in FIGS. 1B-1U and 1V-1Z.

29. The TBM of claim 28, which has the configuration depicted in FIG. 1I.

30. The TBM of claim 29, in which the ABMs have the configuration designated as T6.

31. The TBM of claim 1, which is a tetravalent TBM.

32. The TBM of claim 1, which is a pentavalent TBM.

33. The TBM of claim 1, which is a hexavalent TBM.

34. A conjugate comprising the TBM of any one of claims 1 to 33 and a cytotoxic or cytostatic agent.

35. A pharmaceutical composition comprising the TBM of any one of claims 1 to 33 and an excipient.

36. A method of treating a subject with cancer, comprising administering to a subject suffering from cancer an effective amount of the TBM of any one of claims 1 to 33.

37. The method of claim 36, wherein the cancer is selected from HER2+ cancer, acute lymphoblastic leukemia (ALL), acute myeloid leukemia (AML), adrenocortical carcinoma, anal cancer, appendix cancer, astrocytoma, basal cell carcinoma, brain tumor, bile duct cancer, bladder cancer, bone cancer, breast cancer, bronchial tumor, Burkitt Lymphoma, carcinoma of unknown primary origin, cardiac tumor, cervical cancer, chordoma, chronic lymphocytic leukemia (CLL), chronic myelogenous leukemia (CML), chronic myeloproliferative neoplasm, colon cancer, colorectal cancer, craniopharyngioma, cutaneous T-cell lymphoma, ductal carcinoma, embryonal tumor, endometrial cancer, ependymoma, esophageal cancer, esthesioneuroblastoma, fibrous histiocytoma, Ewing sarcoma, eye cancer, germ cell tumor, gallbladder cancer, gastric cancer, gastrointestinal carcinoid tumor, gastrointestinal stromal tumor, gestational trophoblastic disease, glioma, head and neck cancer, hairy cell leukemia, hepatocellular cancer, histiocytosis, Hodgkin lymphoma, hypopharyngeal cancer, intraocular melanoma, islet cell tumor, Kaposi sarcoma, kidney cancer, Langerhans cell histiocytosis, laryngeal cancer, leukemia, lip and oral cavity cancer, liver cancer, lobular carcinoma in situ, lung cancer, lymphoma, macroglobulinemia, malignant fibrous histiocytoma, melanoma, Merkel cell carcinoma, mesothelioma, metastatic squamous neck cancer with occult primary, midline tract carcinoma involving NUT gene, mouth cancer, multiple endocrine neoplasia syndrome, multiple myeloma, mycosis fungoides, myelodysplastic syndrome, myelodysplastic/myeloproliferative neoplasm, nasal cavity and para-nasal sinus cancer, nasopharyngeal cancer, neuroblastoma, non-Hodgkin lymphoma, non-small cell lung cancer, oropharyngeal cancer, osteosarcoma, ovarian cancer, pancreatic cancer, papillomatosis, paraganglioma, parathyroid cancer, penile cancer, pharyngeal cancer, pheochromocytomas, pituitary tumor, pleuropulmonary blastoma, primary central nervous system lymphoma, prostate cancer, rectal cancer, renal cell cancer, renal pelvis and ureter cancer, retinoblastoma, rhabdoid tumor, salivary gland cancer, Sezary syndrome, skin cancer, small cell lung cancer, small intestine cancer, soft tissue sarcoma, spinal cord tumor, stomach cancer, T-cell lymphoma, teratoid tumor, testicular cancer, throat cancer, thymoma and thymic carcinoma, thyroid cancer, urethral cancer, uterine cancer, vaginal cancer, vulvar cancer, and Wilms tumor.

38. A nucleic acid or plurality of nucleic acids encoding the TBM of any one of claims 1 to 33.

39. A cell engineered to express the TBM of any one of claims 1 to 33.

40. A cell transfected with one or more expression vectors comprising one or more nucleic acid sequences encoding the TBM of any one of claims 1 to 33 under the control of one or more promoters.

41. A method of producing a TBM, comprising:
(a) culturing the cell of claim 40 in conditions under which the TBM is expressed; and
(b) recovering the TBM from the cell culture.

The application's sequence listing, which the Patent Office published only in electronic form, follows.

SEQUENCE LISTING (816 sequences)

SEQ ID NO: 1 - protein, 15 aa, Artificial Sequence
  Description of Artificial Sequence: Synthetic peptide
GGGGSGGGGSGGGGS

SEQ ID NO: 2 - protein, 4 aa, Artificial Sequence
  Description of Artificial Sequence: Synthetic peptide
CPPC

SEQ ID NO: 3 - protein, 4 aa, Artificial Sequence
  Description of Artificial Sequence: Synthetic peptide
SPPS

SEQ ID NO: 4 - protein, 19 aa, Homo sapiens
VPSTPPTPSPSTPPTPSPS

SEQ ID NO: 5 - protein, 6 aa, Homo sapiens
VPPPPP

SEQ ID NO: 6 - protein, 58 aa, Homo sapiens
ESPKAQASSVPTAQPQAEGSLAKATTAPATTRNTGRGGEEKKKEKEKEEQEERETKTP

SEQ ID NO: 7 - protein, 15 aa, Homo sapiens
EPKSCDKTHTCPPCP

SEQ ID NO: 8 - protein, 12 aa, Homo sapiens
ERKCCVECPPCP

SEQ ID NO: 9 - protein, 62 aa, Homo sapiens
ELKTPLGDTTHTCPRCPEPKSCDTPPPCPRCPEPKSCDTPPPCPRCPEPKSCDTPPPCPRCP

SEQ ID NO: 10 - protein, 12 aa, Homo sapiens
ESKYGPPCPSCP

SEQ ID NO: 11 - protein, 12 aa, Homo sapiens
ESKYGPPCPPCP

SEQ ID NO: 12 - protein, 4 aa, Artificial Sequence
  Description of Artificial Sequence: Synthetic peptide
CPSC

SEQ ID NO: 13 - protein, 4 aa, Artificial Sequence
  Description of Artificial Sequence: Synthetic peptide
CPRC

SEQ ID NO: 14 - protein, 4 aa, Artificial Sequence
  Description of Artificial Sequence: Synthetic peptide
SPPC

SEQ ID NO: 15 - protein, 4 aa, Artificial Sequence
  Description of Artificial Sequence: Synthetic peptide
CPPS

SEQ ID NO: 16 - protein, 8 aa, Artificial Sequence
  Description of Artificial Sequence: Synthetic peptide
DKTHTCAA

SEQ ID NO: 17 - protein, 11 aa, Artificial Sequence
  Description of Artificial Sequence: Synthetic peptide
DKTHTCPPCPA

SEQ ID NO: 18 - protein, 18 aa, Artificial Sequence
  Description of Artificial Sequence: Synthetic peptide
DKTHTCPPCPATCPPCPA

SEQ ID NO: 19 - protein, 25 aa, Artificial Sequence
  Description of Artificial Sequence: Synthetic peptide
DKTHTCPPCPATCPPCPATCPPCPA

SEQ ID NO: 20 - protein, 30 aa, Artificial Sequence
  Description of Artificial Sequence: Synthetic polypeptide
DKTHTCPPCPAGKPTLYNSLVMSDTAGTCY

SEQ ID NO: 21 - protein, 31 aa, Artificial Sequence
  Description of Artificial Sequence: Synthetic polypeptide
DKTHTCPPCPAGKPTHVNVSVVMAEVDGTCY

SEQ ID NO: 22 - protein, 15 aa, Artificial Sequence
  Description of Artificial Sequence: Synthetic peptide
DKTHTCCVECPPCPA

SEQ ID NO: 23 - protein, 26 aa, Artificial Sequence
  Description of Artificial Sequence: Synthetic peptide
DKTHTCPRCPEPKSCDTPPPCPRCPA

SEQ ID NO: 24 - protein, 11 aa, Artificial Sequence
  Description of Artificial Sequence: Synthetic peptide
DKTHTCPSCPA

SEQ ID NO: 25 - protein, 5 aa, Artificial Sequence
  Description of Artificial Sequence: Synthetic peptide
GGGGS

SEQ ID NO: 26 - protein, 5 aa, Artificial Sequence
  Description of Artificial Sequence: Synthetic peptide
ADAAP

SEQ ID NO: 27 - protein, 11 aa, Artificial Sequence
  Description of Artificial Sequence: Synthetic peptide
ADAAPTVSIFP

SEQ ID NO: 28 - protein, 12 aa, Artificial Sequence
  Description of Artificial Sequence: Synthetic peptide
ADAAPTVSIFPP

SEQ ID NO: 29 - protein, 6 aa, Artificial Sequence
  Description of Artificial Sequence: Synthetic peptide
AKTTAP

SEQ ID NO: 30 - protein, 13 aa, Artificial Sequence
  Description of Artificial Sequence: Synthetic peptide
AKTTAPSVYPLAP

SEQ ID NO: 31 - protein, 17 aa, Artificial Sequence
  Description of Artificial Sequence: Synthetic peptide
AKTTPKLEEGEFSEARV

SEQ ID NO: 32 - protein, 9 aa, Artificial Sequence
  Description of Artificial Sequence: Synthetic peptide
AKTTPKLGG

SEQ ID NO: 33 - protein, 6 aa, Artificial Sequence
  Description of Artificial Sequence: Synthetic peptide
AKTTPP

SEQ ID NO: 34 - protein, 13 aa, Artificial Sequence
  Description of Artificial Sequence: Synthetic peptide
AKTTPPSVTPLAP

SEQ ID NO: 35 - protein, 6 aa, Artificial Sequence
  Description of Artificial Sequence: Synthetic peptide
ASTKGP

SEQ ID NO: 36 - protein, 13 aa, Artificial Sequence
  Description of Artificial Sequence: Synthetic peptide
ASTKGPSVFPLAP

SEQ ID NO: 37 - protein, 26 aa, Artificial Sequence
  Description of Artificial Sequence: Synthetic peptide
ASTKGPSVFPLAPASTKGPSVFPLAP

SEQ ID NO: 38 - protein, 14 aa, Artificial Sequence
  Description of Artificial Sequence: Synthetic peptide
EGKSSGSGSESKST

SEQ ID NO: 39 - protein, 15 aa, Artificial Sequence
  Description of Artificial Sequence: Synthetic peptide
GEGESGEGESGEGES

SEQ ID NO: 40 - protein, 20 aa, Artificial Sequence
  Description of Artificial Sequence: Synthetic peptide
GEGESGEGESGEGESGEGES

SEQ ID NO: 41 - protein, 15 aa, Artificial Sequence
  Description of Artificial Sequence: Synthetic peptide
GEGGSGEGGSGEGGS

SEQ ID NO: 42 - protein, 15 aa, Artificial Sequence
  Description of Artificial Sequence: Synthetic peptide
GENKVEYAPALMALS

SEQ ID NO: 43 - protein, 15 aa, Artificial Sequence
  Description of Artificial Sequence: Synthetic peptide
GGEGSGGEGSGGEGS

SEQ ID NO: 44 - protein, 15 aa, Artificial Sequence
  Description of Artificial Sequence: Synthetic peptide
GGGESGGEGSGEGGS

SEQ ID NO: 45 - protein, 15 aa, Artificial Sequence
  Description of Artificial Sequence: Synthetic peptide
GGGESGGGESGGGES

SEQ ID NO: 46 - protein, 50 aa, Artificial Sequence
  Description of Artificial Sequence: Synthetic polypeptide
  MISC_FEATURE (1)..(50): This sequence may encompass 1-10 "Gly Gly Gly Gly Ser" repeating units
GGGGSGGGGSGGGGSGGGGSGGGGSGGGGSGGGGSGGGGSGGGGSGGGGS

SEQ ID NO: 47 - protein, 10 aa, Artificial Sequence
  Description of Artificial Sequence: Synthetic peptide
GGGGSGGGGS

SEQ ID NO: 48 - protein, 20 aa, Artificial Sequence
  Description of Artificial Sequence: Synthetic peptide
GGGGSGGGGSGGGGSGGGGS

SEQ ID NO: 49 - protein, 15 aa, Artificial Sequence
  Description of Artificial Sequence: Synthetic peptide
GGGKSGGGKSGGGKS

SEQ ID NO: 50 - protein, 15 aa, Artificial Sequence
  Description of Artificial Sequence: Synthetic peptide
GGGKSGGKGSGKGGS

SEQ ID NO: 51 - protein, 15 aa, Artificial Sequence
  Description of Artificial Sequence: Synthetic peptide
GGKGSGGKGSGGKGS

SEQ ID NO: 52 - protein, 5 aa, Artificial Sequence
  Description of Artificial Sequence: Synthetic peptide
GGSGG

SEQ ID NO: 53 - protein, 9 aa, Artificial Sequence
  Description of Artificial Sequence: Synthetic peptide
GGSGGGGSG

SEQ ID NO: 54 - protein, 13 aa, Artificial Sequence
  Description of Artificial Sequence: Synthetic peptide
GGSGGGGSGGGGS

SEQ ID NO: 55 - protein, 15 aa, Artificial Sequence
  Description of Artificial Sequence: Synthetic peptide
GHEAAAVMQVQYPAS

SEQ ID NO: 56 - protein, 15 aa, Artificial Sequence
  Description of Artificial Sequence: Synthetic peptide
GKGGSGKGGSGKGGS

SEQ ID NO: 57 - protein, 15 aa, Artificial Sequence
  Description of Artificial Sequence: Synthetic peptide
GKGKSGKGKSGKGKS

SEQ ID NO: 58 - protein, 20 aa, Artificial Sequence
  Description of Artificial Sequence: Synthetic peptide
GKGKSGKGKSGKGKSGKGKS

SEQ ID NO: 59 - protein, 15 aa, Artificial Sequence
  Description of Artificial Sequence: Synthetic peptide
GKPGSGKPGSGKPGS

SEQ ID NO: 60 - protein, 20 aa, Artificial Sequence
  Description of Artificial Sequence: Synthetic peptide
GKPGSGKPGSGKPGSGKPGS

SEQ ID NO: 61 - protein, 15 aa, Artificial Sequence
  Description of Artificial Sequence: Synthetic peptide
GPAKELTPLKEAKVS

SEQ ID NO: 62 - protein, 12 aa, Artificial Sequence
  Description of Artificial Sequence: Synthetic peptide
GSAGSAAGSGEF

SEQ ID NO: 63 - protein, 14 aa, Artificial Sequence
  Description of Artificial Sequence: Synthetic peptide
IRPRAIGGSKPRVA

SEQ ID NO: 64 - protein, 18 aa, Artificial Sequence
  Description of Artificial Sequence: Synthetic peptide
KESGSVSSEQLAQFRSLD

SEQ ID NO: 65 - protein, 15 aa, Artificial Sequence
  Description of Artificial Sequence: Synthetic peptide
KTTPKLEEGEFSEAR

SEQ ID NO: 66 - protein, 6 aa, Artificial Sequence
  Description of Artificial Sequence: Synthetic peptide
QPKAAP

SEQ ID NO: 67 - protein, 13 aa, Artificial Sequence
  Description of Artificial Sequence: Synthetic peptide
QPKAAPSVTLFPP

SEQ ID NO: 68 - protein, 27 aa, Artificial Sequence
  Description of Artificial Sequence: Synthetic peptide
RADAAAAGGGGSGGGGSGGGGSGGGGS

SEQ ID NO: 69 - protein, 12 aa, Artificial Sequence
  Description of Artificial Sequence: Synthetic peptide
RADAAAAGGPGS

SEQ ID NO: 70 - protein, 6 aa, Artificial Sequence
  Description of Artificial Sequence: Synthetic peptide
RADAAP

SEQ ID NO: 71 - protein, 9 aa, Artificial Sequence
  Description of Artificial Sequence: Synthetic peptide
RADAAPTVS

SEQ ID NO: 72 - protein, 6 aa, Artificial Sequence
  Description of Artificial Sequence: Synthetic peptide
SAKTTP

SEQ ID NO: 73 - protein, 18 aa, Artificial Sequence
  Description of Artificial Sequence: Synthetic peptide
SAKTTPKLEEGEFSEARV

SEQ ID NO: 74 - protein, 10 aa, Artificial Sequence
  Description of Artificial Sequence: Synthetic peptide
SAKTTPKLGG

SEQ ID NO: 75 - protein, 14 aa, Artificial Sequence
  Description of Artificial Sequence: Synthetic peptide
STAGDTHLGGEDFD

SEQ ID NO: 76 - protein, 5 aa, Artificial Sequence
  Description of Artificial Sequence: Synthetic peptide
TVAAP

SEQ ID NO: 77 - protein, 12 aa, Artificial Sequence
  Description of Artificial Sequence: Synthetic peptide
TVAAPSVFIFPP

SEQ ID NO: 78 - protein, 24 aa, Artificial Sequence
  Description of Artificial Sequence: Synthetic peptide
TVAAPSVFIFPPTVAAPSVFIFPP

SEQ ID NO: 79 - protein, 119 aa, Artificial Sequence [sequence omitted]

SEQ ID NO: 80 - protein, 106 aa, Artificial Sequence [sequence omitted]

SEQ ID NO: 81 - protein, 125 aa, Artificial Sequence
  Description of Artificial Sequence: Synthetic polypeptide
EVQLVESGGGLVQPKGSLKLSCAASGFTFNTYAMNWVRQAPGKGLEWVARIRSKYNNYATYYADSVKDRFTISRDDSQSILYLQMNNLKTEDTAMYYCVRHGNFGNSYVSWFAYWGQGTLVTVSA

SEQ ID NO: 82 - protein, 109 aa, Artificial Sequence
  Description of Artificial Sequence: Synthetic polypeptide
QAVVTQESALTTSPGETVTLTCRSSTGAVTTSNYANWVQEKPDHLFTGLIGGTNKRAPGVPARFSGSLIGDKAALTITGAQTEDEAIYFCALWYSNLWVFGGGTKLTVL

SEQ ID NO: 83 - protein, 119 aa, Artificial Sequence
  Description of Artificial Sequence: Synthetic polypeptide
QVQLQQSGAELARPGASVKMSCKASGYTFTSYTMHWVKQRPGQGLEWIGYINPSSGYTKYNQKFKDKATLTADKSSSTAYMQLSSLTSEDSAVYYCARWQDYDVYFDYWGQGTTLTVSS

SEQ ID NO: 84 - protein, 106 aa, Artificial Sequence
  Description of Artificial Sequence: Synthetic polypeptide
QIVLSQSPAILSASPGEKVTMTCRASSSVSYMHWYQQKPGSSPKPWIYATSNLASGVPARFSGSGSGTSYSLTISRVEAEDAATYYCQQWSSNPPTFGGGTKLETK

SEQ ID NO: 85 - protein, 106 aa, Artificial Sequence
  Description of Artificial Sequence: Synthetic polypeptide
QIVLTQSPAIMSASPGEKVTMTCRASSSVSYMNWYQQKSGTSPKRWIYDTSKVASGVPYRFSGSGSGTSYSLTISSMEAEDAATYYCQQWSSNPLTFGSGTKLEIN

SEQ ID NO: 86 - protein, 119 aa, Artificial Sequence [sequence omitted]

SEQ ID NO: 87 - protein, 106 aa, Artificial Sequence [sequence omitted]

SEQ ID NO: 88 - protein, 118 aa, Artificial Sequence [sequence omitted]

SEQ ID NO: 89 - protein, 108 aa, Artificial Sequence [sequence omitted]

SEQ ID NO: 90 - protein, 124 aa, Artificial Sequence
  Description of Artificial Sequence: Synthetic polypeptide
EVQLVESGGGLVQPGGSLRLSCAASGFTFSTYAMNWVRQAPGKGLEWVGRIRSKYNNYATYYADSVKDRFISRDDSKNSLYLQMNSLKTEDTAVYYCVRHGNFGNSYVSWFAYWGQGTLVTVSS

SEQ ID NO: 91 - protein, 107 aa, Artificial Sequence
  Description of Artificial Sequence: Synthetic polypeptide
QAVVTQEPSLTVSPGGTVTLTCRSSTGAVTTSNYANWVQQKPGQAPRGLIGGTNKRAPWTPARFSGSLLGGKAALIGAQAEDEADYYCALWYSNLWVFGGGTKLTVL

SEQ ID NO: 92 - protein, 119 aa, Artificial Sequence
  Description of Artificial Sequence: Synthetic polypeptide
DIKLQQSGAELARPGASVKMSCKTSGYTFTRYTMHWVKQRPGQGLEWIGYINPSRGYTNYNQKFKDKATLTTDKSSSTAYMQLSSLTSEDSAVYYCARYYDDHYCLDYWGQGTTLTVSS

SEQ ID NO: 93 - protein, 105 aa, Artificial Sequence
  Description of Artificial Sequence: Synthetic polypeptide
DIQLTQSPAIMSASPGEKVTMTCRASSSVSYMNWYQQKSGTSPKRWIYDTSKVASGVPYRFSGSGSGTSYSLISSMEAEDAATYYCQQWSSNPLTFGAGTKLELK

SEQ ID NO: 94 - protein, 124 aa, Artificial Sequence
  Description of Artificial Sequence: Synthetic polypeptide
EVQLVESGGGLVQPGGSLRLSCAASGFTFNTYAMNWVRQAPGKGLEWVARIRSKYNNYATYYADSVKDRFISRDDSKNSLYLQMNSLKTEDTAVYYCVRHGNFGNSYVSWFAYWGQGTLVTVSS

SEQ ID NO: 95 - protein, 125 aa, Artificial Sequence
  Description of Artificial Sequence: Synthetic polypeptide
EVKLLESGGGLVQPKGSLKLSCAASGFTFNTYAMNWVRQAPGKGLEWVARIRSKYNNYATYYADSVKDRFTISRDDSQSILYLQMNNLKTEDTAMYYCVRHGNFGNSYVSWFAYWGQGTLVTVSA

SEQ ID NO: 96 - protein, 125 aa, Artificial Sequence
  Description of Artificial Sequence: Synthetic polypeptide
EVQLVESGGGLVQPGGSLKLSCAASGFTFNSYAMNWVRQAPGKGLEWVARIRSKYNNYATYYADSVKGRFTISRDDSKNTAYLQMNNLKTEDTAVYYCVRHGNFGNSYVSWWAYWGQGTLVTVSS

SEQ ID NO: 97 - protein, 109 aa, Artificial Sequence
  Description of Artificial Sequence: Synthetic polypeptide
QTVVTQEPSLTVSPGGTVTLTCGSSTGAVTSGNYPNWVQQKPGQAPRGLIGGTKFLAPGTPQRFSGSLLGGKAALTLSGVQPEDEAEYYCVLWYSNRWVFGGGTKLTVL

SEQ ID NO: 98 - protein, 125 aa, Artificial Sequence
  Description of Artificial Sequence: Synthetic polypeptide
EVQLVESGGGLVQPGGSLKLSCAASGFTFNKYAMNWVRQAPGKGLEWVARIRSKYNNYATYYADSVKDRFTISRDDSKNTAYLQMNNLKTEDTAVYYCVRHGNFGNSYISYWAYWGQGTLVTVSS

SEQ ID NO: 99 - protein, 109 aa, Artificial Sequence
  Description of Artificial Sequence: Synthetic polypeptide
QTVVTQEPSLTVSPGGTVTLTCGSSTGAVTSGNYPNWVQQKPGQAPRGLIGGTKFLAPGTPARFSGSLLGGKAALTLSGVQPEDEAEYYCVLWYSNRWVFGGGTKLTVL

SEQ ID NO: 100 - protein, 119 aa, Artificial Sequence
  Description of Artificial Sequence: Synthetic polypeptide
QVQLVQSGAEVKKPGASVKVSCKASGYTFTRYTMHWVRQAPGQGLEWMGYINPSRGYTNYNQKFKDRVTMTTDTSISTAYMELSRLRSDDTAVYYCARYYDDHYCLDYWGQGTLVTVSS

SEQ ID NO: 101 - protein, 106 aa, Artificial Sequence
  Description of Artificial Sequence: Synthetic polypeptide
EIVLTQSPATLSLSPGERATLSCSASSSVSYMNWYQQKPGQAPRLLIYDTSKLASGVPAHFRGSGSGTDFTLTISSLEPEDFAVYYCQQWSSNPFTFGQGTKVEIK

SEQ ID NO: 102 - protein, 125 aa, Artificial Sequence
  Description of Artificial Sequence: Synthetic polypeptide
EVQLVESGGGLVQPGGSLRLSCAASGFTFSTYAMNWVRQAPGKGLEWVSRIRSKYNNYATYYADSVKDRFTISRDDSKNTLYLQMNSLRAEDTAVYYCARHGNFGNSYVSWFAYWGQGTMVTVSS

SEQ ID NO: 103 - protein, 109 aa, Artificial Sequence
  Description of Artificial Sequence: Synthetic polypeptide
QAVVTQEPSLTVSPGGTVTLTCRSSTGAVTTSNYANWVQQKPGQAPRGLIGGTNKRAPGTPARFSGSLLGGKAALTLSGVQPEDEAEYYCALWYSNLWVFGGGTKLTVL

SEQ ID NO: 104 - protein, 125 aa, Artificial Sequence
  Description of Artificial Sequence: Synthetic polypeptide
EVQLVESGGGLVQPGGSLRLSCAASGFTFNTYAMNWVRQAPGKGLEWVGRIRSKYNNYATYYADSVKDRFTISRDDSKNSLYLQMNSLKTEDTAVYYCVRHGNFGNSYVSWFAYWGQGTLVTVSS

SEQ ID NO: 105 - protein, 109 aa, Artificial Sequence
  Description of Artificial Sequence: Synthetic polypeptide
QAVVTQEPSLTVSPGGTVTLTCRSSTGAVTTSNYANWVQEKPGQAPRGLIGGTNKRAPWTPARFSGSLLGGKAALTITGAQAEDEADYYCALWYSNLWVFGGGTKLTVL

SEQ ID NO: 106 - protein, 125 aa, Artificial Sequence
  Description of Artificial Sequence: Synthetic polypeptide
EVQLVESGGGLVQPGGSLRLSCAASGFTFNTYAMNWVRQAPGKGLEWVGRIRSKYNNYATYYADSVKGRFTISRDDSKNTLYLQMNSLRAEDTAVYYCVRHGNFGNSYVSWFAYWGQGTLVTVSS

SEQ ID NO: 107 - protein, 109 aa, Artificial Sequence
  Description of Artificial Sequence: Synthetic polypeptide
QAVVTQEPSLTVSPGGTVTLTCGSSTGAVTTSNYANWVQQKPGQAPRGLIGGTNKRAPGVPARFSGSLLGGKAALTLSGAQPEDEAEYYCALWYSNLWVFGGGTKLTVL

SEQ ID NO: 108 - protein, 125 aa, Artificial Sequence
  Description of Artificial Sequence: Synthetic polypeptide
EVQLVESGGGLVQPGGSLRLSCAASGFTFSTYAMNWVRQAPGKGLEWVGRIRSKYNNYATYYADSVKGRFTISRDDSKNTLYLQMNSLRAEDTAVYYCVRHGNFGDSYVSWFAYWGQGTLVTVSS

SEQ ID NO: 109 - protein, 109 aa, Artificial Sequence
  Description of Artificial Sequence: Synthetic polypeptide
QAVVTQEPSLTVSPGGTVTLTCGSSTGAVTTSNYANWVQQKPGKSPRGLIGGTNKRAPGVPARFSGSLLGGKAALTISGAQPEDEADYYCALWYSNHWVFGGGTKLTVL

SEQ ID NO: 110 - protein, 101 aa, Artificial Sequence
  Description of Artificial Sequence: Synthetic polypeptide
DIQMTQSPSSLSASVGDRVTITCSASSSVSYMNWYQQTPGKAPKRWIYDTSKLASGVPSRFSGSGSGTDYTFTISSLQPEDIATYYCQQWSSNPFTFGQGT

SEQ ID NO: 111 - protein, 119 aa, Artificial Sequence
  Description of Artificial Sequence: Synthetic polypeptide
QVQLVQSGGGVVQPGRSLRLSCKASGYTFTRYTMHWVRQAPGKGLEWIGYINPSRGYTNYNQKVKDRFTISRDNSKNTAFLQMDSLRPEDTGVYFCARYYDDHYSLDYWGQGTPVTVSS

SEQ ID NO: 112 - protein, 122 aa, Artificial Sequence
  Description of Artificial Sequence: Synthetic polypeptide
EVQLQQSGPELVKPGASMKISCKASGYSFTGYTMNWVKQSHGKNLEWMGLINPYKGVSTYNQKFKDKATLTVDKSSSTAYMELLSLTSEDSAVYYCARSGYYGDSDWYFDVWGQGTTLTVFS

SEQ ID NO: 113 - protein, 107 aa, Artificial Sequence
  Description of Artificial Sequence: Synthetic polypeptide
DIQMTQTTSSLSASLGDRVTISCRASQDIRNYLNWYQQKPDGTVKLLIYYTSRLHSGVPSKFSGSGSGTDYSLTISNLEQEDIATYFCQQGNTLPWTFAGGTKLEIK

SEQ ID NO: 114 - protein, 125 aa, Artificial Sequence
  Description of Artificial Sequence: Synthetic polypeptide
EVQLVESGGGLVQPGGSLKLSCAASGFTFNTYAMNWVRQASGKGLEWVGRIRSKYNNYATYYADSVKDRFTISRDDSKSTLYLQMNSLKTEDTAVYYCVRHGNFGNSYVSWFAYWGQGTLVTVSS

SEQ ID NO: 115 - protein, 109 aa, Artificial Sequence
  Description of Artificial Sequence: Synthetic polypeptide
QAVVTQEPSLTVSPGGTVTLTCRSSTGAVTTSNYANWVQQKPGQAPRGLIGGTNKRAPWTPARFSGSLLGDKAALTLSGAQPEDEAEYFCALWYSNLWVFGGGTKLTVL

SEQ ID NO: 116 - protein, 254 aa, Artificial Sequence
  Description of Artificial Sequence: Synthetic polypeptide
EVQLVESGGGLVQPGGSLKLSCAASGFTFNTYAMNWVRQASGKGLEWVGRIRSKYNNYATYYADSVKDRFTISRDDSKSTLYLQMNSLKTEDTAVYYCVRHGNFGNSYVSWFAYWGQGTLVTVSSGGGGSGGGGSGGGGSGGGGSQAVVTQEPSLTVSPGGTVTLTCRSSTGAVTTSNYANWVQQKPGQAPRGLIGGTNKRAPWTPARFSGSLLGDKAALTLSGAQPEDEAEYFCALWYSNLWVFGGGTKLTVL

SEQ ID NO: 117 - protein, 254 aa, Artificial Sequence
  Description of Artificial Sequence: Synthetic polypeptide
EVQLVESGGGLVQPGGSLRLSCAASGFTFSTYAMNWVRQAPGKGLEWVGRIRSKYNNYATYYADSVKGRFTISRDDSKNTLYLQMNSLRAEDTAVYYCVRHGNFGDSYVSWFAYWGQGTLVTVSSGKPGSGKPGSGKPGSGKPGSQAVVTQEPSLTVSPGGTVTLTCGSSTGAVTTSNYANWVQQKPGKSPRGLIGGTNKRAPGVPARFSGSLLGGKAALTISGAQPEDEADYYCALWYSNHWVFGGGTKLTVL

SEQ ID NO: 118 - protein, 125 aa, Artificial Sequence
  Description of Artificial Sequence: Synthetic polypeptide
EVQLVESGGGLVQPGGSLRLSCAASGFTFSTYAMNWVRQAPGKGLEWVGRIRSKANNYATYYADSVKGRFTISRDDSKNTLYLQMNSLRAEDTAVYYCVRHGNFGDSYVSWFAYWGQGTLVTVSS

SEQ ID NO: 119 - protein, 254 aa, Artificial Sequence
  Description of Artificial Sequence: Synthetic polypeptide
EVQLVESGGGLVQPGGSLRLSCAASGFTFSTYAMNWVRQAPGKGLEWVGRIRSKANNYATYYADSVKGRFTISRDDSKNTLYLQMNSLRAEDTAVYYCVRHGNFGDSYVSWFAYWGQGTLVTVSSGKPGSGKPGSGKPGSGKPGSQAVVTQEPSLTVSPGGTVTLTCGSSTGAVTTSNYANWVQQKPGKSPRGLIGGTNKRAPGVPARFSGSLLGGKAALTISGAQPEDEADYYCALWYSNHWVFGGGTKLTVL

SEQ ID NO: 120 - protein, 125 aa, Artificial Sequence
  Description of Artificial Sequence: Synthetic polypeptide
EVQLVESGGGLVQPGGSLRLSCAASGFTFSTYAMNWVRQAPGKGLEWVGRIRSKYNNYATYYADSVKGRFTISRDDSKNTLYLQMNSLRAEDTAVYYCVRHGNFGDEYVSWFAYWGQGTLVTVSS

SEQ ID NO: 121 - protein, 254 aa, Artificial Sequence
  Description of Artificial Sequence: Synthetic polypeptide
EVQLVESGGGLVQPGGSLRLSCAASGFTFSTYAMNWVRQAPGKGLEWVGRIRSKYNNYATYYADSVKGRFTISRDDSKNTLYLQMNSLRAEDTAVYYCVRHGNFGDEYVSWFAYWGQGTLVTVSSGKPGSGKPGSGKPGSGKPGSQAVVTQEPSLTVSPGGTVTLTCGSSTGAVTTSNYANWVQQKPGKSPRGLIGGTNKRAPGVPARFSGSLLGGKAALTISGAQPEDEADYYCALWYSNHWVFGGGTKLTVL

SEQ ID NO: 122 - protein, 125 aa, Artificial Sequence
  Description of Artificial Sequence: Synthetic polypeptide
EVQLVESGGGLVQPGGSLRLSCAASGFTFSTYAMNWVRQAPGKGLEWVGRIRSKYNNYATYYADSVKGRFTISRDDSKNTLYLQMNSLRAEDTAVYYCVRHGNFGDPYVSWFAYWGQGTLVTVSS

SEQ ID NO: 123 - protein, 254 aa, Artificial Sequence
  Description of Artificial Sequence: Synthetic polypeptide
EVQLVESGGGLVQPGGSLRLSCAASGFTFSTYAMNWVRQAPGKGLEWVGRIRSKYNNYATYYADSVKGRFTISRDDSKNTLYLQMNSLRAEDTAVYYCVRHGNFGDPYVSWFAYWGQGTLVTVSSGKPGSGKPGSGKPGSGKPGSQAVVTQEPSLTVSPGGTVTLTCGSSTGAVTTSNYANWVQQKPGKSPRGLIGGTNKRAPGVPARFSGSLLGGKAALTISGAQPEDEADYYCALWYSNHWVFGGGTKLTVL

SEQ ID NO: 124 - protein, 125 aa, Artificial Sequence
  Description of Artificial Sequence: Synthetic polypeptide
EVQLVESGGGLVQPGGSLRLSCAASGFTFSTYAMNWVRQAPGKGLEWVGRIRSKYNNYATYYADSVKGRFTISRDDSKNTLYLQMNSLRAEDTAVYYCVRHGNFGDSYVSWFDYWGQGTLVTVSS

SEQ ID NO: 125 - protein, 254 aa, Artificial Sequence
  Description of Artificial Sequence: Synthetic polypeptide
EVQLVESGGGLVQPGGSLRLSCAASGFTFSTYAMNWVRQAPGKGLEWVGRIRSKYNNYATYYADSVKGRFTISRDDSKNTLYLQMNSLRAEDTAVYYCVRHGNFGDSYVSWFDYWGQGTLVTVSSGKPGSGKPGSGKPGSGKPGSQAVVTQEPSLTVSPGGTVTLTCGSSTGAVTTSNYANWVQQKPGKSPRGLIGGTNKRAPGVPARFSGSLLGGKAALTISGAQPEDEADYYCALWYSNHWVFGGGTKLTVL

SEQ ID NO: 126 - protein, 125 aa, Artificial Sequence
  Description of Artificial Sequence: Synthetic polypeptide
EVQLVESGGGLVQPGGSLRLSCAASGFTFSTYAMSWVRQAPGKGLEWVGRIRSKYNNYATYYADSVKGRFTISRDDSKNTLYLQMNSLRAEDTAVYYCVRHGNFGDSYVSWFAYWGQGTLVTVSS

SEQ ID NO: 127 - protein, 254 aa, Artificial Sequence
  Description of Artificial Sequence: Synthetic polypeptide
EVQLVESGGGLVQPGGSLRLSCAASGFTFSTYAMSWVRQAPGKGLEWVGRIRSKYNNYATYYADSVKGRFTISRDDSKNTLYLQMNSLRAEDTAVYYCVRHGNFGDSYVSWFAYWGQGTLVTVSSGKPGSGKPGSGKPGSGKPGSQAVVTQEPSLTVSPGGTVTLTCGSSTGAVTTSNYANWVQQKPGKSPRGLIGGTNKRAPGVPARFSGSLLGGKAALTISGAQPEDEADYYCALWYSNHWVFGGGTKLTVL

SEQ ID NO: 128 - protein, 257 aa, Artificial Sequence
  Description of Artificial Sequence: Synthetic polypeptide
EVQLVESGGGLVQPGGSLRLSCAASGFTFNTYAMNWVRQAPGKGLEWVGRIRSKYNNYATYYADSVKGRFTISRDDSKNTLYLQMNSLRAEDTAVYYCVRHGNFGNSYVSWFAYWGQGTLVTVSSGGGGSGGGGSGGGGSQAVVTQEPSLTVSPGGTVTLTCGSSTGAVTTSNYANWVQQKPGQAPRGLIGGTNKRAPGVPARFSGSLLGGKAALTLSGAQPEDEAEYYCALWYSNLWVFGGGTKLTVLGSHHHHHH

SEQ ID NO: 129 - protein, 5 aa, Artificial Sequence
  Description of Artificial Sequence: Synthetic peptide
RYTMH

SEQ ID NO: 130 - protein, 10 aa, Artificial Sequence
  Description of Artificial Sequence: Synthetic peptide
SASSSVSYMN

SEQ ID NO: 131 - protein, 5 aa, Artificial Sequence
  Description of Artificial Sequence: Synthetic peptide
TYAMN

SEQ ID NO: 132 - protein, 14 aa, Artificial Sequence
  Description of Artificial Sequence: Synthetic peptide
RSSTGAVTTSNYAN

SEQ ID NO: 133 - protein, 5 aa, Artificial Sequence
  Description of Artificial Sequence: Synthetic peptide
SYTMH

SEQ ID NO: 134 - protein, 10 aa, Artificial Sequence
  Description of Artificial Sequence: Synthetic peptide
RASSSVSYMH

SEQ ID NO: 135 - protein, 10 aa, Artificial Sequence
  Description of Artificial Sequence: Synthetic peptide
RASSSVSYMN

SEQ ID NO: 136 - protein, 5 aa, Artificial Sequence
  Description of Artificial Sequence: Synthetic peptide
GYGMH

SEQ ID NO: 137 - protein, 11 aa, Artificial Sequence
  Description of Artificial Sequence: Synthetic peptide
RASQSVSSYLA

SEQ ID NO: 138 - protein, 5 aa, Artificial Sequence
  Description of Artificial Sequence: Synthetic peptide
SYAMN

SEQ ID NO: 139 - protein, 14 aa, Artificial Sequence
  Description of Artificial Sequence: Synthetic peptide
GSSTGAVTSGNYPN

SEQ ID NO: 140 - protein, 5 aa, Artificial Sequence
  Description of Artificial Sequence: Synthetic peptide
KYAMN

SEQ ID NO: 141 - protein, 14 aa, Artificial Sequence
  Description of Artificial Sequence: Synthetic peptide
GSSTGAVTTSNYAN

SEQ ID NO: 142 - protein, 5 aa, Artificial Sequence
  Description of Artificial Sequence: Synthetic peptide
GYTMN

SEQ ID NO: 143 - protein, 11 aa, Artificial Sequence
  Description of Artificial Sequence: Synthetic peptide
RASQDIRNYLN

SEQ ID NO: 144 - protein, 5 aa, Artificial Sequence
  Description of Artificial Sequence: Synthetic peptide
TYAMS

SEQ ID NO: 145 - protein, 5 aa, Artificial Sequence
  Description of Artificial Sequence: Synthetic peptide
TYAMH

SEQ ID NO: 146 - protein, 14 aa, Artificial Sequence
  Description of Artificial Sequence: Synthetic peptide
GSSTGAVTSSNYAN

SEQ ID NO: 147 - protein, 14 aa, Artificial Sequence
  Description of Artificial Sequence: Synthetic peptide
GSSTGAVTSGHYAN

SEQ ID NO: 148 - protein, 14 aa, Artificial Sequence
  Description of Artificial Sequence: Synthetic peptide
KSSTGAVTTSNYAN

SEQ ID NO: 149 - protein, 17 aa, Artificial Sequence
  Description of Artificial Sequence: Synthetic peptide
YINPSRGYTNYNQKFKD

SEQ ID NO: 150 - protein, 7 aa, Artificial Sequence
  Description of Artificial Sequence: Synthetic peptide
DTSKLAS

SEQ ID NO: 151 - protein, 19 aa, Artificial Sequence
  Description of Artificial Sequence: Synthetic peptide
RIRSKYNNYATYYADSVKD

SEQ ID NO: 152 - protein, 7 aa, Artificial Sequence
  Description of Artificial Sequence: Synthetic peptide
GTNKRAP

SEQ ID NO: 153 - protein, 17 aa, Artificial Sequence
  Description of Artificial Sequence: Synthetic peptide
YINPSSGYTKYNQKFKD

SEQ ID NO: 154 - protein, 7 aa, Artificial Sequence
  Description of Artificial Sequence: Synthetic peptide
ATSNLAS

SEQ ID NO: 155 - protein, 7 aa, Artificial Sequence
  Description of Artificial Sequence: Synthetic peptide
DTSKVAS

SEQ ID NO: 156 - protein, 17 aa, Artificial Sequence
  Description of Artificial Sequence: Synthetic peptide
YINPSRGYTNYNQKVKD

SEQ ID NO: 157 - protein, 17 aa, Artificial Sequence
  Description of Artificial Sequence: Synthetic peptide
VIWYDGSKKYYVDSVKG

SEQ ID NO: 158 - protein, 7 aa, Artificial Sequence
  Description of Artificial Sequence: Synthetic peptide
DASNRAT

SEQ ID NO: 159 - protein, 15 aa, Artificial Sequence
  Description of Artificial Sequence: Synthetic peptide
RIRSKYNNYATYYAD

SEQ ID NO: 160 - protein, 19 aa, Artificial Sequence
  Description of Artificial Sequence: Synthetic peptide
RIRSKYNNYATYYADSVKG

SEQ ID NO: 161 - protein, 7 aa, Artificial Sequence
  Description of Artificial Sequence: Synthetic peptide
GTKFLAP

SEQ ID NO: 162 - protein, 17 aa, Artificial Sequence
  Description of Artificial Sequence: Synthetic peptide
LINPYKGVSTYNQKFKD

SEQ ID NO: 163 - protein, 6 aa, Artificial Sequence
  Description of Artificial Sequence: Synthetic peptide
YTSRLH

SEQ ID NO: 164 - protein, 19 aa, Artificial Sequence
  Description of Artificial Sequence: Synthetic peptide
RIRSKANNYATYYADSVKG

SEQ ID NO: 165 - protein, 20 aa, Artificial Sequence
  Description of Artificial Sequence: Synthetic peptide
RIRSKANNYYATYYADSVKG

SEQ ID NO: 166 - protein, 19 aa, Artificial Sequence
  Description of Artificial Sequence: Synthetic peptide
RIRSKANSYATYYADSVKG

SEQ ID NO: 167 - protein, 19 aa, Artificial Sequence
  Description of Artificial Sequence: Synthetic peptide
RIRSKYNNYATAYADSVKG

SEQ ID NO: 168 - protein, 7 aa, Artificial Sequence
  Description of Artificial Sequence: Synthetic peptide
DTNKRAP

SEQ ID NO: 169 - protein, 7 aa, Artificial Sequence
  Description of Artificial Sequence: Synthetic peptide
GTNNRAP

SEQ ID NO: 170 - protein, 7 aa, Artificial Sequence
  Description of Artificial Sequence: Synthetic peptide
GTNKRAS

SEQ ID NO: 171 - protein, 7 aa, Artificial Sequence
  Description of Artificial Sequence: Synthetic peptide
GTSNKHS

SEQ ID NO: 172 - protein, 18 aa, Artificial Sequence
  Description of Artificial Sequence: Synthetic peptide
RIRSNGGYSTYYADSVKG

SEQ ID NO: 173 - protein, 10 aa, Artificial Sequence
  Description of Artificial Sequence: Synthetic peptide
YYDDHYCLDY

SEQ ID NO: 174 - protein, 9 aa, Artificial Sequence
  Description of Artificial Sequence: Synthetic peptide
QQWSSNPFT

SEQ ID NO: 175 - protein, 14 aa, Artificial Sequence
  Description of Artificial Sequence: Synthetic peptide
HGNFGNSYVSWFAY

SEQ ID NO: 176 - protein, 9 aa, Artificial Sequence
  Description of Artificial Sequence: Synthetic peptide
ALWYSNLWV

SEQ ID NO: 177 - protein, 10 aa, Artificial Sequence
  Description of Artificial Sequence: Synthetic peptide
WQDYDVYFDY

SEQ ID NO: 178 - protein, 9 aa, Artificial Sequence
  Description of Artificial Sequence: Synthetic peptide
QQWSSNPPT

SEQ ID NO: 179 - protein, 9 aa, Artificial Sequence
  Description of Artificial Sequence: Synthetic peptide
QQWSSNPLT

SEQ ID NO: 180 - protein, 9 aa, Artificial Sequence
  Description of Artificial Sequence: Synthetic peptide
QMGYWHFDL

SEQ ID NO: 181 - protein, 10 aa, Artificial Sequence
  Description of Artificial Sequence: Synthetic peptide
QQRSNWPPLT

SEQ ID NO: 182 - protein, 16 aa, Artificial Sequence
  Description of Artificial Sequence: Synthetic peptide
VRHGNFGNSYVSWFAY

SEQ ID NO: 183 - protein, 14 aa, Artificial Sequence
  Description of Artificial Sequence: Synthetic peptide
HGNFGNSYVSWWAY

SEQ ID NO: 184 - protein, 9 aa, Artificial Sequence
  Description of Artificial Sequence: Synthetic peptide
VLWYSNRWV

SEQ ID NO: 185 - protein, 14 aa, Artificial Sequence
  Description of Artificial Sequence: Synthetic peptide
HGNFGNSYISYWAY

SEQ ID NO: 186 - protein, 14 aa, Artificial Sequence
  Description of Artificial Sequence: Synthetic peptide
HGNFGDSYVSWFAY

SEQ ID NO: 187 - protein, 9 aa, Artificial Sequence
  Description of Artificial Sequence: Synthetic peptide
ALWYSNHWV

SEQ ID NO: 188 - protein, 10 aa, Artificial Sequence
  Description of Artificial Sequence: Synthetic peptide
YYDDHYSLDY

SEQ ID NO: 189 - protein, 13 aa, Artificial Sequence
  Description of Artificial Sequence: Synthetic peptide
SGYYGDSDWYFDV

SEQ ID NO: 190 - protein, 9 aa, Artificial Sequence
  Description of Artificial Sequence: Synthetic peptide
QQGNTLPWT

SEQ ID NO: 191 - protein, 14 aa, Artificial Sequence
  Description of Artificial Sequence: Synthetic peptide
HGNFGDEYVSWFAY

SEQ ID NO: 192 - protein, 14 aa, Artificial Sequence
  Description of Artificial Sequence: Synthetic peptide
HGNFGDPYVSWFAY

SEQ ID NO: 193 - protein, 14 aa, Artificial Sequence
  Description of Artificial Sequence: Synthetic peptide
HGNFGDSYVSWFDY

SEQ ID NO: 194 - protein, 14 aa, Artificial Sequence
  Description of Artificial Sequence: Synthetic peptide
HGNFGQSYVSWFAY

SEQ ID NO: 195 - protein, 14 aa, Artificial Sequence
  Description of Artificial Sequence: Synthetic peptide
HGNFGNSYVSWFDY

SEQ ID NO: 196 - protein, 9 aa, Artificial Sequence
  Description of Artificial Sequence: Synthetic peptide
LLWYSNLWV

SEQ ID NO: 197 - protein, 7 aa, Artificial Sequence
  Description of Artificial Sequence: Synthetic peptide
GYTFTRY

SEQ ID NO: 198 - protein, 6 aa, Artificial Sequence
  Description of Artificial Sequence: Synthetic peptide
SSSVSY

SEQ ID NO: 199 - protein, 7 aa, Artificial Sequence
  Description of Artificial Sequence: Synthetic peptide
GFTFNTY

SEQ ID NO: 200 - protein, 10 aa, Artificial Sequence
  Description of Artificial Sequence: Synthetic peptide
STGAVTTSNY

SEQ ID NO: 201 - protein, 7 aa, Artificial Sequence
  Description of Artificial Sequence: Synthetic peptide
GYTFTSY

SEQ ID NO: 202 - protein, 7 aa, Artificial Sequence
  Description of Artificial Sequence: Synthetic peptide
GFKFSGY

SEQ ID NO: 203 - protein, 7 aa, Artificial Sequence
  Description of Artificial Sequence: Synthetic peptide
SQSVSSY

SEQ ID NO: 204 - protein, 7 aa, Artificial Sequence
  Description of Artificial Sequence: Synthetic peptide
GFTFSTY

SEQ ID NO: 205 - protein, 7 aa, Artificial Sequence
  Description of Artificial Sequence: Synthetic peptide
GFTFNSY

SEQ ID NO: 206 - protein, 10 aa, Artificial Sequence
  Description of Artificial Sequence: Synthetic peptide
STGAVTSGNY

SEQ ID NO: 207 - protein, 7 aa, Artificial Sequence
  Description of Artificial Sequence: Synthetic peptide
GFTFNKY

SEQ ID NO: 208 - protein, 7 aa, Artificial Sequence
  Description of Artificial Sequence: Synthetic peptide
GYSFTGY

SEQ ID NO: 209 - protein, 7 aa, Artificial Sequence
  Description of Artificial Sequence: Synthetic peptide
SQDIRNY

SEQ ID NO: 210 - protein, 6 aa, Artificial Sequence
  Description of Artificial Sequence: Synthetic peptide
NPSRGY

SEQ ID NO: 211 - protein, 3 aa, Artificial Sequence
  Description of Artificial Sequence: Synthetic peptide
DTS

SEQ ID NO: 212 - protein, 8 aa, Artificial Sequence
  Description of Artificial Sequence: Synthetic peptide
RSKYNNYA

SEQ ID NO: 213 - protein, 3 aa, Artificial Sequence
  Description of Artificial Sequence: Synthetic peptide
GTN

SEQ ID NO: 214 - protein, 6 aa, Artificial Sequence
  Description of Artificial Sequence: Synthetic peptide
NPSSGY

SEQ ID NO: 215 - protein, 3 aa, Artificial Sequence
  Description of Artificial Sequence: Synthetic peptide
ATS

SEQ ID NO: 216 - protein, 6 aa, Artificial Sequence
  Description of Artificial Sequence: Synthetic peptide
WYDGSK

SEQ ID NO: 217 - protein, 3 aa, Artificial Sequence
  Description of Artificial Sequence: Synthetic peptide
DAS

SEQ ID NO: 218 - protein, 9 aa, Artificial Sequence
  Description of Artificial Sequence: Synthetic peptide
RSKYNNYAT

SEQ ID NO: 219 - protein, 3 aa, Artificial Sequence
  Description of Artificial Sequence: Synthetic peptide
GTK

SEQ ID NO: 220 - protein, 6 aa, Artificial Sequence
  Description of Artificial Sequence: Synthetic peptide
NPYKGV

SEQ ID NO: 221 - protein, 3 aa, Artificial Sequence
  Description of Artificial Sequence: Synthetic peptide
YTS

SEQ ID NO: 222 - protein, 6 aa, Artificial Sequence
  Description of Artificial Sequence: Synthetic peptide
WSSNPF

SEQ ID NO: 223 - protein, 6 aa, Artificial Sequence
  Description of Artificial Sequence: Synthetic peptide
WYSNLW

SEQ ID NO: 224 - protein, 6 aa, Artificial Sequence
  Description of Artificial Sequence: Synthetic peptide
WSSNPP

SEQ ID NO: 225 - protein, 6 aa, Artificial Sequence
  Description of Artificial Sequence: Synthetic peptide
WSSNPL

SEQ ID NO: 226 - protein, 7 aa, Artificial Sequence
  Description of Artificial Sequence: Synthetic peptide
RSNWPPL

SEQ ID NO: 227 - protein, 13 aa, Artificial Sequence
  Description of Artificial Sequence: Synthetic peptide
HGNFGNSYVSWFA

SEQ ID NO: 228 - protein, 6 aa, Artificial Sequence
  Description of Artificial Sequence: Synthetic peptide
WYSNRW

SEQ ID NO: 229 - protein, 6 aa, Artificial Sequence
  Description of Artificial Sequence: Synthetic peptide
WYSNHW

SEQ ID NO: 230 - protein, 6 aa, Artificial Sequence
  Description of Artificial Sequence: Synthetic peptide
GNTLPW

SEQ ID NO: 231 - protein, 10 aa, Artificial Sequence
  Description of Artificial Sequence: Synthetic peptide
GYTFTRYTMH

SEQ ID NO: 232 - protein, 10 aa, Artificial Sequence
  Description of Artificial Sequence: Synthetic peptide
GFTFNTYAMN

SEQ ID NO: 233 - protein, 10 aa, Artificial Sequence
  Description of Artificial Sequence: Synthetic peptide
GYTFTSYTMH

SEQ ID NO: 234 - protein, 10 aa, Artificial Sequence
  Description of Artificial Sequence: Synthetic peptide
GFKFSGYGMH

SEQ ID NO: 235 - protein, 10 aa, Artificial Sequence
  Description of Artificial Sequence: Synthetic peptide
GFTFSTYAMN

SEQ ID NO: 236 - protein, 10 aa, Artificial Sequence
  Description of Artificial Sequence: Synthetic peptide
GFTFNSYAMN

SEQ ID NO: 237 - protein, 10 aa, Artificial Sequence
  Description of Artificial Sequence: Synthetic peptide
GFTFNKYAMN

SEQ ID NO: 238 - protein, 10 aa, Artificial Sequence
  Description of Artificial Sequence: Synthetic peptide
GYSFTGYTMN

SEQ ID NO: 239 - protein, 18 aa, Artificial Sequence
  Description of Artificial Sequence: Synthetic peptide
RIRSKYNNYATYYADSVK

SEQ ID NO: 240 - protein, 7 aa, Artificial Sequence
  Description of Artificial Sequence: Synthetic peptide
YTSRLHS

SEQ ID NO: 241 - protein, 13 aa, Artificial Sequence
  Description of Artificial Sequence: Synthetic peptide
KASGYKFTSYVMH

SEQ ID NO: 242 - protein, 16 aa, Artificial Sequence
  Description of Artificial Sequence: Synthetic peptide
YINPYNDVTKYNEKFK

SEQ ID NO: 243 - protein, 11 aa, Artificial Sequence
  Description of Artificial Sequence: Synthetic peptide
GSYYDYDGFVY

SEQ ID NO: 244 - protein, 10 aa, Artificial Sequence
  Description of Artificial Sequence: Synthetic peptide
SATSSVSYMH

SEQ ID NO: 245 - protein, 120 aa, Artificial Sequence
  Description of Artificial Sequence: Synthetic polypeptide
EVQLQQSGPELVKPGASVKMSCKASGYKFTSYVMHWVKQKPGQGLEWIGYINPYNDVTKYNEKFKGKATLTSDKSSSTAYMELSSLTSEDSAVHYCARGSYYDYDGFVYWGQGTLVTVSA

SEQ ID NO: 246 - protein, 106 aa, Artificial Sequence
  Description of Artificial Sequence: Synthetic polypeptide
QIVLTQSPAIMSASPGEKVTMTCSATSSVSYMHWYQQKSGTSPKRWIYDTSKLASGVPARFSGSGSGTSYSLTISSMEAEDAATYYCQQWSSNPLTFGAGTKLELK

SEQ ID NO: 247 - protein, 5 aa, Rattus sp.
EYYMY

SEQ ID NO: 248 - protein, 17 aa, Rattus sp.
RIDPEDGSIDYVEKFKK

SEQ ID NO: 249 - protein, 9 aa, Rattus sp.
GKFNYRFAY

SEQ ID NO: 250 - protein, 16 aa, Rattus sp.
RSSQSLLHSSGNTYLN

SEQ ID NO: 251 - protein, 7 aa, Rattus sp.
LVSKLES

SEQ ID NO: 252 - protein, 8 aa, Rattus sp.
QFTHYPYT

SEQ ID NO: 253 - protein, 118 aa, Rattus sp.
EVQLQQSGPELQRPGASVKLSCKASGYIFTEYYMYWVKQRPKQGLELVGRIDPEDGSIDYVEKFKKKATLTADTSSNTAYMQLSSLTSEDTATYFCARGKFNYRFAYWGQGTLVTVSS

SEQ ID NO: 254 - protein, 112 aa, Artificial Sequence
  Description of Artificial Sequence: Synthetic polypeptide
DVVLTQTPPTLLATIGQSVSISCRSSQSLLHSSGNTYLNWLLQRTGQSPQPLIYLVSKLESGVPNRFSGSGSGTDFTLKISGVEAEDLGVYYCMQFTHYPYTFGAGTKLELK

SEQ ID NO: 255 - protein, 118 aa, Artificial Sequence
  Description of Artificial Sequence: Synthetic polypeptide
QVQLVQSGAEVKKPGASVKVSCKASGYTFTEYYMYWVRQAPGQGLELMGRIDPEDGSIDYVEKFKKKVTLTADTSSSTAYMELSSLTSDDTAVYYCARGKFNYRFAYWGQGTLVTVSS

SEQ ID NO: 256 - protein, 112 aa, Artificial Sequence
  Description of Artificial Sequence: Synthetic polypeptide
DVVMTQSPPSLLVTLGQPASISCRSSQSLLHSSGNTYLNWLLQRPGQSPQPLIYLVSKLESGVPDRFSGSGSGTDFTLKISGVEAEDVGVYYCMQFTHYPYTFGQGTKLEIK

SEQ ID NO: 257 - protein, 118 aa, Artificial Sequence; identical to SEQ ID NO: 253
  Description of Artificial Sequence: Synthetic polypeptide

SEQ ID NO: 258 - protein, 250 aa, Homo sapiens
MVAGSDAGRALGVLSVVCLLHCFGFISCFSQQIYGVVYGNVTFHVPSNVPLKEVLWKKQKDKVAELENSEFRAFSSFKNRVYLDTVSGSLTIYNLTSSDEDEYEMESPNITDTMKFFLYVLESLPSPTLTCALTNGSIEVQCMIPEHYNSHRGLIMYSWDCPMEQCKRNSTSIYFKMENDLPQKIQCTLSNPLFNTTSSIILTTCIPSSGHSRHRYALIPIPLAVITTCIVLYMNGILKCDRKPDRTNSN

SEQ ID NO: 259 - protein, 187 aa, Homo sapiens
FSQQIYGVVYGNVTFHVPSNVPLKEVLWKKQKDKVAELENSEFRAFSSFKNRVYLDTVSGSLTIYNLTSSDEDEYEMESPNITDTMKFFLYVLESLPSPTLTCALTNGSIEVQCMIPEHYNSHRGLIMYSWDCPMEQCKRNSTSIYFKMENDLPQKIQCTLSNPLFNTTSSIILTTCIPSSGHSRHR

SEQ ID NO: 260 - protein, 187 aa, Artificial Sequence
  Description of Artificial Sequence: Synthetic polypeptide
  MOD_RES (1)..(1): Phe or Ser
  MOD_RES (9)..(9): Val or Lys
  MOD_RES (21)..(21): Val or Gln
  MOD_RES (58)..(58): Val or Lys
  MOD_RES (85)..(85): Thr or Ser
  MOD_RES (93)..(93): Leu or Gly
XSQQIYGVXYGNVTFHVPSNXPLKEVLWKKQKDKVAELENSEFRAFSSFKNRVYLDTXSGSLTIYNLTSSDEDEYEMESPNITDXMKFFLYVXESLPSPTLTCALTNGSIEVQCMIPEHYNSHRGLIMYSWDCPMEQCKRNSTSIYFKMENDLPQKIQCTLSNPLFNTTSSIILTTCIPSSGHSRHR

SEQ ID NO: 261 - protein, 44 aa, Homo sapiens
SQQIYGVVYGNVTFHVPSNVPLKEVLWKKQKDKVAELENSEFRA

SEQ ID NO: 262 - protein, 44 aa, Artificial Sequence
  Description of Artificial Sequence: Synthetic polypeptide
  MOD_RES (8)..(8): Val or Lys
  MOD_RES (20)..(20): Val or Gln
SQQIYGVXYGNVTFHVPSNXPLKEVLWKKQKDKVAELENSEFRA

SEQ ID NO: 263 - protein, 115 aa, Artificial Sequence
  Description of Artificial Sequence: Synthetic polypeptide
EVQLVESGGGLVQPGGSLRLSCAVSGFALSNHGMSWVRRAPGKGLEWVSGIVYSGSTYYAASVKGRFTISRDNSRNTLYLQMNSLRPEDTAIYYCSAHGGESDVWGQGTTVTVSS

SEQ ID NO: 264 - protein, 107 aa, Artificial Sequence
  Description of Artificial Sequence: Synthetic polypeptide
DIQLTQSPSSLSASVGDRVTITCRASQSISSYLNWYQQKPGKAPKLLIYAASSLQSGVPSRFSGSGSGTDFTLTISSLQPEDFATYYCQQSYSTPYTFGQGTKVEIK

SEQ ID NO: 265 - protein, 239 aa, Artificial Sequence
  Description of Artificial Sequence: Synthetic polypeptide
EVQLVESGGGLVQPGGSLRLSCAVSGFALSNHGMSWVRRAPGKGLEWVSGIVYSGSTYYAASVKGRFTISRDNSRNTLYLQMNSLRPEDTAIYYCSAHGGESDVWGQGTTVTVSSASGGGGSGGRASGGGGSDIQLTQSPSSLSASVGDRVTITCRASQSISSYLNWYQQKPGKAPKLLIYAASSLQSGVPSRFSGSGSGTDFTLTISSLQPEDFATYYCQQSYSTPYTFGQGTKVEIK

SEQ ID NO: 266 - protein, 120 aa, Artificial Sequence
  Description of Artificial Sequence: Synthetic polypeptide
QVQLVESGGGLVQPGRSLRLSCAASGFTFSNYAMSWVRQAPGKGLGWVSGISRSGENTYYADSVKGRFTISRDNSKNTLYLQMNSLRDEDTAVYYCARSPAHYYGGMDVWGQGTTVTVSS

SEQ ID NO: 267 - protein, 109 aa, Artificial Sequence
  Description of Artificial Sequence: Synthetic polypeptide
DIVLTQSPGTLSLSPGERATLSCRASQSISSSFLAWYQQKPGQAPRLLIYGASRRATGIPDRFSGSGSGTDFTLTISRLEPEDSAVYYCQQYHSSPSWTFGQGTKLEIK

SEQ ID NO: 268 - protein, 246 aa, Artificial Sequence
  Description of Artificial Sequence: Synthetic polypeptide
QVQLVESGGGLVQPGRSLRLSCAASGFTFSNYAMSWVRQAPGKGLGWVSGISRSGENTYYADSVKGRFTISRDNSKNTLYLQMNSLRDEDTAVYYCARSPAHYYGGMDVWGQGTTVTVSSASGGGGSGGRASGGGGSDIVLTQSPGTLSLSPGERATLSCRASQSISSSFLAWYQQKPGQAPRLLIYGASRRATGIPDRFSGSGSGTDFTLTISRLEPEDSAVYYCQQYHSSPSWTFGQGTKLEIK

SEQ ID NO: 269 - protein, 115 aa, Artificial Sequence
  Description of Artificial Sequence: Synthetic polypeptide
QVQLVESGGGLVQPGRSLRLSCAASGFTFDDYAMHWVRQAPGKGLEWVSGISWNSGSIGYADSVKGRFTISRDNAKNSLYLQMNSLRAEDTALYYCSVHSFLAYWGQGTLVTVSS

SEQ ID NO: 270 - protein, 112 aa, Artificial Sequence
  Description of Artificial Sequence: Synthetic polypeptide
DIVMTQTPLSLPVTPGEPASISCRSSQSLLHSNGYNYLDWYLQKPGQSPQLLIYLGSNRASGVPDRFSGSGSGTDFTLKISRVEAEDVGVYYCMQALQTPYTFGQGTKVEIK

SEQ ID NO: 271 - protein, 244 aa, Artificial Sequence
  Description of Artificial Sequence: Synthetic polypeptide
QVQLVESGGGLVQPGRSLRLSCAASGFTFDDYAMHWVRQAPGKGLEWVSGISWNSGSIGYADSVKGRFTISRDNAKNSLYLQMNSLRAEDTALYYCSVHSFLAYWGQGTLVTVSSASGGGGSGGRASGGGGSDIVMTQTPLSLPVTPGEPASISCRSSQSLLHSNGYNYLDWYLQKPGQSPQLLIYLGSNRASGVPDRFSGSGSGTDFTLKISRVEAEDVGVYYCMQALQTPYTFGQGTKVEIK

SEQ ID NO: 272 - protein, 115 aa, Artificial Sequence
  Description of Artificial Sequence: Synthetic polypeptide
EVQLLESGGGLVQPGGSLRLSCAVSGFALSNHGMSWVRRAPGKGLEWVSGIVYSGSTYYAASVKGRFTISRDNSRNTLYLQMNSLRPEDTAIYYCSAHGGESDVWGQGTTVTVSS

SEQ ID NO: 273 - protein, 111 aa, Artificial Sequence
  Description of Artificial Sequence: Synthetic polypeptide
DIVMTQTPLSLSVTPGQPASISCKSSQSLLRNDGKTPLYWYLQKAGQPPQLLIYEVSNRFSGVPDRFSGSGSGTDFTLKISRVEAEDVGAYYCMQNIQFPSFGGGTKLEIK

SEQ ID NO: 274 - protein, 243 aa, Artificial Sequence
  Description of Artificial Sequence: Synthetic polypeptide
EVQLLESGGGLVQPGGSLRLSCAVSGFALSNHGMSWVRRAPGKGLEWVSGIVYSGSTYYAASVKGRFTISRDNSRNTLYLQMNSLRPEDTAIYYCSAHGGESDVWGQGTTVTVSSASGGGGSGGRASGGGGSDIVMTQTPLSLSVTPGQPASISCKSSQSLLRNDGKTPLYWYLQKAGQPPQLLIYEVSNRFSGVPDRFSGSGSGTDFTLKISRVEAEDVGAYYCMQNIQFPSFGGGTKLEIK

SEQ ID NO: 275 - protein, 120 aa, Artificial Sequence
  Description of Artificial Sequence: Synthetic polypeptide
QVQLVQSGAEVRKTGASVKVSCKASGYIFDNFGINWVRQAPGQGLEWMGWINPKNNNTNYAQKFQGRVTITADESTNTAYMEVSSLRSEDTAVYYCARGPYYYQSYMDVWGQGTMVTVSS

SEQ ID NO: 276 - protein, 112 aa, Artificial Sequence
  Description of Artificial Sequence: Synthetic polypeptide
DIVMTQTPLSLPVTPGEPASISCRSSQSLLHSNGYNYLNWYLQKPGQSPQLLIYLGSKRASGVPDRFSGSGSGTDFTLHITRVGAEDVGVYYCMQALQTPYTFGQGTKLEIK

SEQ ID NO: 277 - protein, 249 aa, Artificial Sequence
  Description of Artificial Sequence: Synthetic polypeptide
QVQLVQSGAEVRKTGASVKVSCKASGYIFDNFGINWVRQAPGQGLEWMGWINPKNNNTNYAQKFQGRVTITADESTNTAYMEVSSLRSEDTAVYYCARGPYYYQSYMDVWGQGTMVTVSSASGGGGSGGRASGGGGSDIVMTQTPLSLPVTPGEPASISCRSSQSLLHSNGYNYLNWYLQKPGQSPQLLIYLGSKRASGVPDRFSGSGSGTDFTLHITRVGAEDVGVYYCMQALQTPYTFGQGTKLEIK

SEQ ID NO: 278 - protein, 123 aa, Artificial Sequence
  Description of Artificial Sequence: Synthetic polypeptide
QVQLQESGGGLVQPGGSLRLSCAASGFTFSSDAMTWVRQAPGKGLEWVSVISGSGGTTYYADSVKGRFTISRDNSKNTLYLQMNSLRAEDTAVYYCAKLDSSGYYYARGPRYWGQGTLVTVSS

SEQ ID NO: 279 - protein, 106 aa, Artificial Sequence
  Description of Artificial Sequence: Synthetic polypeptide
DIQLTQSPSSLSASVGDRVTITCRASQSISSYLNWYQQKPGKAPKLLIYGASTLASGVPARFSGSGSGTHFTLTINSLQSEDSATYYCQQSYKRASFGQGTKVEIK

SEQ ID NO: 280 - protein, 246 aa, Artificial Sequence
  Description of Artificial Sequence: Synthetic polypeptide
QVQLQESGGGLVQPGGSLRLSCAASGFTFSSDAMTWVRQAPGKGLEWVSVISGSGGTTYYADSVKGRFTISRDNSKNTLYLQMNSLRAEDTAVYYCAKLDSSGYYYARGPRYWGQGTLVTVSSASGGGGSGGRASGGGGSDIQLTQSPSSLSASVGDRVTITCRASQSISSYLNWYQQKPGKAPKLLIYGASTLASGVPARFSGSGSGTHFTLTINSLQSEDSATYYCQQSYKRASFGQGTKVEIK

SEQ ID NO: 281 - protein, 118 aa, Artificial Sequence
  Description of Artificial Sequence: Synthetic polypeptide
QVQLVQSGAEVKKPGASVKVSCKASGYTFSNYGITWVRQAPGQGLEWMGWISAYNGNTNYAQKFQGRVTMTRNTSISTAYMELSSLRSEDTAVYYCARGPYYYYMDVWGKGTMVTVSS

SEQ ID NO: 282 - protein, 112 aa, Artificial Sequence
  Description of Artificial Sequence: Synthetic polypeptide
EIVMTQSPLSLPVTPGEPASISCRSSQSLLYSNGYNYVDWYLQKPGQSPQLLIYLGSNRASGVPDRFSGSGSGTDFKLQISRVEAEDVGIYYCMQGRQFPYSFGQGTKVEIK

SEQ ID NO: 283 - protein, 247 aa, Artificial Sequence
  Description of Artificial Sequence: Synthetic polypeptide
QVQLVQSGAEVKKPGASVKVSCKASGYTFSNYGITWVRQAPGQGLEWMGWISAYNGNTNYAQKFQGRVTMTRNTSISTAYMELSSLRSEDTAVYYCARGPYYYYMDVWGKGTMVTVSSASGGGGSGGRASGGGGSEIVMTQSPLSLPVTPGEPASISCRSSQSLLYSNGYNYVDWYLQKPGQSPQLLIYLGSNRASGVPDRFSGSGSGTDFKLQISRVEAEDVGIYYCMQGRQFPYSFGQGTKVEIK

SEQ ID NO: 284 - protein, 115 aa, Artificial Sequence
  Description of Artificial Sequence: Synthetic polypeptide
EVQLLETGGGLVQPGGSLRLSCAVSGFALSNHGMSWVRRAPGKGLEWVSGIVYSGSTYYAASVKGRFTISRDNSRNTLYLQMNSLRPEDTAIYYCSAHGGESDVWGQGTTVTVSS

SEQ ID NO: 285 - protein, 106 aa, Artificial Sequence
  Description of Artificial Sequence: Synthetic polypeptide
EIVLTQSPATLSVSPGESATLSCRASQSVSSNLAWYQQKPGQAPRLLIYGASTRASGIPDRFSGSGSGTDFTLTISSLQAEDVAVYYCQQYGSSLTFGGGTKVEIK

SEQ ID NO: 286 - protein, 238 aa, Artificial Sequence
  Description of Artificial Sequence: Synthetic polypeptide
EVQLLETGGGLVQPGGSLRLSCAVSGFALSNHGMSWVRRAPGKGLEWVSGIVYSGSTYYAASVKGRFTISRDNSRNTLYLQMNSLRPEDTAIYYCSAHGGESDVWGQGTTVTVSSASGGGGSGGRASGGGGSEIVLTQSPATLSVSPGESATLSCRASQSVSSNLAWYQQKPGQAPRLLIYGASTRASGIPDRFSGSGSGTDFTLTISSLQAEDVAVYYCQQYGSSLTFGGGTKVEIK

SEQ ID NO: 287 - protein, 115 aa, Artificial Sequence
  Description of Artificial Sequence: Synthetic polypeptide
EVQLVETGGGLVQPGGSLRLSCAVSGFALSNHGMSWVRRAPGKGLEWVSGIVYSGSTYYAASVKGRFTISRDNSRNTLYLQMNSLRPEDTAIYYCSAHGGESDVWGQGTTVTVSS

SEQ ID NO: 288 - protein, 107 aa, Artificial Sequence
  Description of Artificial Sequence: Synthetic polypeptide
EIVMTQSPATLSVSPGERATLSCRASQSVSSKLAWYQQKPGQAPRLLMYGASIRATGIPDRFSGSGSGTEFTLTISSLEPEDFAVYYCQQYGSSSWTFGQGTKVEIK

SEQ ID NO: 289 - protein, 239 aa, Artificial Sequence
  Description of Artificial Sequence: Synthetic polypeptide
EVQLVETGGGLVQPGGSLRLSCAVSGFALSNHGMSWVRRAPGKGLEWVSGIVYSGSTYYAASVKGRFTISRDNSRNTLYLQMNSLRPEDTAIYYCSAHGGESDVWGQGTTVTVSSASGGGGSGGRASGGGGSEIVMTQSPATLSVSPGERATLSCRASQSVSSKLAWYQQKPGQAPRLLMYGASIRATGIPDRFSGSGSGTEFTLTISSLEPEDFAVYYCQQYGSSSWTFGQGTKVEIK

SEQ ID NO: 290 - protein, 115 aa, Artificial Sequence
  Description of Artificial Sequence: Synthetic polypeptide
EVQLVETGGGVVQPGGSLRLSCAVSGFALSNHGMSWVRRAPGKGLEWVSGIVYSGSTYYAASVKGRFTISRDNSRNTLYLQMNSLRPEDTAIYYCSAHGGESDVWGQGTTVTVSS

SEQ ID NO: 291 - protein, 109 aa, Artificial Sequence
  Description of Artificial Sequence: Synthetic polypeptide
EIVLTQSPGTLSLSPGERATLSCRASQSVGSTNLAWYQQKPGQAPRLLIYDASNRATGIPDRFSGGGSGTDFTLTISRLEPEDFAVYYCQQYGSSPPWTFGQGTKVEIK

SEQ ID NO: 292 - protein, 241 aa, Artificial Sequence
  Description of Artificial Sequence: Synthetic polypeptide
EVQLVETGGGVVQPGGSLRLSCAVSGFALSNHGMSWVRRAPGKGLEWVSGIVYSGSTYYAASVKGRFTISRDNSRNTLYLQMNSLRPEDTAIYYCSAHGGESDVWGQGTTVTVSSASGGGGSGGRASGGGGSEIVLTQSPGTLSLSPGERATLSCRASQSVGSTNLAWYQQKPGQAPRLLIYDASNRATGIPDRFSGGGSGTDFTLTISRLEPEDFAVYYCQQYGSSPPWTFGQGTKVEIK

SEQ ID NO: 293 - protein, 117 aa, Artificial Sequence
  Description of Artificial Sequence: Synthetic polypeptide
QVQLVESGGGLVKPGGSLRLSCAASGFTFSDYYMSWIRQAPGKGLEWVSYISSSGSTIYYADSVKGRFTISRDNAKNSLYLQMNSLRAEDTAVYYCARESGDGMDVWGQGTTVTVSS

SEQ ID NO: 294 - protein, 105 aa, Artificial Sequence
  Description of Artificial Sequence: Synthetic polypeptide
DIQMTQSPSSLSASVGDRVTITCRASQSISSYLNWYQQKPGKAPKLLIYAASSLQSGVPSRFSGSGSGTDFTLTISSLQPEDFATYYCQQSYTLAFGQGTKVDIK

SEQ ID NO: 295 - protein, 239 aa, Artificial Sequence
  Description of Artificial Sequence: Synthetic polypeptide
QVQLVESGGGLVKPGGSLRLSCAASGFTFSDYYMSWIRQAPGKGLEWVSYISSSGSTIYYADSVKGRFTISRDNAKNSLYLQMNSLRAEDTAVYYCARESGDGMDVWGQGTTVTVSSASGGGGSGGRASGGGGSDIQMTQSPSSLSASVGDRVTITCRASQSISSYLNWYQQKPGKAPKLLIYAASSLQSGVPSRFSGSGSGTDFTLTISSLQPEDFATYYCQQSYTLAFGQGTKVDIK

SEQ ID NO: 296 - protein, 117 aa, Artificial Sequence
  Description of Artificial Sequence: Synthetic polypeptide
QVQLVQSGGGLVKPGGSLRLSCAASGFTFSDYYMSWIRQAPGKGLEWVSYISSSGNTIYYADSVKGRFTISRDNAKNSLYLQMNSLRAEDTAVYYCARSTMVREDYWGQGTLVTVSS

SEQ ID NO: 297 - protein, 112 aa, Artificial Sequence
  Description of Artificial Sequence: Synthetic polypeptide
DIVLTQSPLSLPVTLGQPASISCKSSESLVHNSGKTYLNWFHQRPGQSPRRLIYEVSNRDSGVPDRFTGSGSGTDFTLKISRVEAEDVGVYYCMQGTHWPGTFGQGTKLEIK

SEQ ID NO: 298 - protein, 246 aa, Artificial Sequence
  Description of Artificial Sequence: Synthetic polypeptide
QVQLVQSGGGLVKPGGSLRLSCAASGFTFSDYYMSWIRQAPGKGLEWVSYISSSGNTIYYADSVKGRFTISRDNAKNSLYLQMNSLRAEDTAVYYCARSTMVREDYWGQGTLVTVSSASGGGGSGGRASGGGGSDIVLTQSPLSLPVTLGQPASISCKSSESLVHNSGKTYLNWFHQRPGQSPRRLIYEVSNRDSGVPDRFTGSGSGTDFTLKISRVEAEDVGVYYCMQGTHWPGTFGQGTKLEIK

SEQ ID NO: 299 - protein, 115 aa, Artificial Sequence
  Description of Artificial Sequence: Synthetic polypeptide
QVQLVESGGGLVQPGGSLRLSCAVSGFALSNHGMSWVRRAPGKGLEWVSGIVYSGSTYYAASVKGRFTISRDNSRNTLYLQMNSLRPEDTAIYYCSAHGGESDVWGQGTTVTVSS

SEQ ID NO: 300 - protein, 107 aa, Artificial Sequence
  Description of Artificial Sequence: Synthetic polypeptide
DIRLTQSPSPLSASVGDRVTITCQASEDINKFLNWYHQTPGKAPKLLIYDASTLQTGVPSRFSGSGSGTDFTLTINSLQPEDIGTYYCQQYESLPLTFGGGTKVEIK

SEQ ID NO: 301 - protein, 239 aa, Artificial Sequence
  Description of Artificial Sequence: Synthetic polypeptide
QVQLVESGGGLVQPGGSLRLSCAVSGFALSNHGMSWVRRAPGKGLEWVSGIVYSGSTYYAASVKGRFTISRDNSRNTLYLQMNSLRPEDTAIYYCSAHGGESDVWGQGTTVTVSSASGGGGSGGRASGGGGSDIRLTQSPSPLSASVGDRVTITCQASEDINKFLNWYHQTPGKAPKLLIYDASTLQTGVPSRFSGSGSGTDFTLTINSLQPEDIGTYYCQQYESLPLTFGGGTKVEIK

SEQ ID NO: 302 - protein, 108 aa, Artificial Sequence
  Description of Artificial Sequence: Synthetic polypeptide
ETTLTQSPATLSVSPGERATLSCRASQSVGSNLAWYQQKPGQGPRLLIYGASTRATGIPARFSGSGSGTEFTLTISSLQPEDFAVYYCQQYNDWLPVTFGQGTKVEIK

SEQ ID NO: 303 - protein, 240 aa, Artificial Sequence
  Description of Artificial Sequence: Synthetic polypeptide
EVQLVETGGGLVQPGGSLRLSCAVSGFALSNHGMSWVRRAPGKGLEWVSGIVYSGSTYYAASVKGRFTISRDNSRNTLYLQMNSLRPEDTAIYYCSAHGGESDVWGQGTTVTVSSASGGGGSGGRASGGGGSETTLTQSPATLSVSPGERATLSCRASQSVGSNLAWYQQKPGQGPRLLIYGASTRATGIPARFSGSGSGTEFTLTISSLQPEDFAVYYCQQYNDWLPVTFGQGTKVEIK

SEQ ID NO: 304 - protein, 109 aa, Artificial Sequence
  Description of Artificial Sequence: Synthetic polypeptide
EIVLTQSPGTLSLSPGERATLSCRASQSIGSSSLAWYQQKPGQAPRLLMYGASSRASGIPDRFSGSGSGTDFTLTISRLEPEDFAVYYCQQYAGSPPFTFGQGTKVEIK

SEQ ID NO: 305 - protein, 241 aa, Artificial Sequence
  Description of Artificial Sequence: Synthetic polypeptide
EVQLVESGGGLVQPGGSLRLSCAVSGFALSNHGMSWVRRAPGKGLEWVSGIVYSGSTYYAASVKGRFTISRDNSRNTLYLQMNSLRPEDTAIYYCSAHGGESDVWGQGTTVTVSSASGGGGSGGRASGGGGSEIVLTQSPGTLSLSPGERATLSCRASQSIGSSSLAWYQQKPGQAPRLLMYGASSRASGIPDRFSGSGSGTDFTLTISRLEPEDFAVYYCQQYAGSPPFTFGQGTKVEIK

SEQ ID NO: 306 - protein, 121 aa, Artificial Sequence
  Description of Artificial Sequence: Synthetic polypeptide
QVQLQESGPGLVKPSETLSLTCTVSGGSISSSYYYWGWIRQPPGKGLEWIGSIYYSGSAYYNPSLKSRVTISVDTSKNQFSLRLSSVTAADTAVYYCARHWQEWPDAFDIWGQGTMVTVSS

SEQ ID NO: 307 - protein, 107 aa, Artificial Sequence
  Description of Artificial Sequence: Synthetic polypeptide
ETTLTQSPAFMSATPGDKVIISCKASQDIDDAMNWYQQKPGEAPLFIIQSATSPVPGIPPRFSGSGFGTDFSLTINNIESEDAAYYFCLQHDNFPLTFGQGTKLEIK

SEQ ID NO: 308 - protein, 243 aa, Artificial Sequence
  Description of Artificial Sequence: Synthetic polypeptide
QVQLQESGPGLVKPSETLSLTCTVSGGSISSSYYYWGWIRQPPGKGLEWIGSIYYSGSAYYNPSLKSRVTISVDTSKNQFSLRLSSVTAADTAVYYCARHWQEWPDAFDIWGQGTMVTVSSGGGGSGGGGSGGGGSETTLTQSPAFMSATPGDKVIISCKASQDIDDAMNWYQQKPGEAPLFIIQSATSPVPGIPPRFSGSGFGTDFSLTINNIESEDAAYYFCLQHDNFPLTFGQGTKLEIK

SEQ ID NO: 309 - protein, 123 aa, Artificial Sequence
  Description of Artificial Sequence: Synthetic polypeptide
QVNLRESGPALVKPTQTLTLTCTFSGFSLRTSGMCVSWIRQPPGKALEWLARIDWDEDKFYSTSLKTRLTISKDTSDNQVVLRMTNMDPADTATYYCARSGAGGTSATAFDIWGPGTMVTVSS

SEQ ID NO: 310 - protein, 107 aa, Artificial Sequence
  Description of Artificial Sequence: Synthetic polypeptide
DIQMTQSPSSLSASVGDRVTITCRASQDIYNNLAWFQLKPGSAPRSLMYAANKSQSGVPSRFSGSASGTDFTLTISSLQPEDFATYYCQHYYRFPYSFGQGTKLEIK

SEQ ID NO: 311 - protein, 244 aa, Artificial Sequence
  Description of Artificial Sequence: Synthetic polypeptide
VNLRESGPALVKPTQTLTLTCTFSGFSLRTSGMCVSWIRQPPGKALEWLARIDWDEDKFYSTSLKTRLTISKDTSDNQVVLRMTNMDPADTATYYCARSGAGGTSATAFDIWGPGTMVTVSSGGGGSGGGGSGGGGSDIQMTQSPSSLSASVGDRVTITCRASQDIYNNLAWFQLKPGSAPRSLMYAANKSQSGVPSRFSGSASGTDFTLTISSLQPEDFATYYCQHYYRFPYSFGQGTKLEIK

SEQ ID NO: 312 - protein, 119 aa, Artificial Sequence
  Description of Artificial Sequence: Synthetic polypeptide
EVQLVESGGGLVKPGGSLRLSCAASGFTFSSYSMNWVRQAPGKGLEWVSSISSSSSYIYYADSVKGRFTISRDNAKNSLYLQMNSLRAEDTAVYYCAKTIAAVYAFDIWGQGTTVTVSS

SEQ ID NO: 313 - protein, 112 aa, Artificial Sequence
  Description of Artificial Sequence: Synthetic polypeptide
EIVLTQSPLSLPVTPEEPASISCRSSQSLLHSNGYNYLDWYLQKPGQSPQLLIYLGSNRASGVPDRFSGSGSGTDFTLKISRVEAEDVGVYYCMQALQTPYTFGQGTKLEIK

SEQ ID NO: 314 - protein, 246 aa, Artificial Sequence
  Description of Artificial Sequence: Synthetic polypeptide
EVQLVESGGGLVKPGGSLRLSCAASGFTFSSYSMNWVRQAPGKGLEWVSSISSSSSYIYYADSVKGRFTISRDNAKNSLYLQMNSLRAEDTAVYYCAKTIAAVYAFDIWGQGTTVTVSSGGGGSGGGGSGGGGSEIVLTQSPLSLPVTPEEPASISCRSSQSLLHSNGYNYLDWYLQKPGQSPQLLIYLGSNRASGVPDRFSGSGSGTDFTLKISRVEAEDVGVYYCMQALQTPYTFGQGTKLEIK

SEQ ID NO: 315 - protein, 117 aa, Artificial Sequence
  Description of Artificial Sequence: Synthetic polypeptide
EVQLVESGGGLVKPGGSLRLSCAASGFTFSDYYMSWIRQAPGKGLEWVSYISSSGSTIYYADSVKGRFTISRDNAKNSLYLQMNSLRAEDTAVYYCARDLRGAFDIWGQGTMVTVSS

SEQ ID NO: 316 - protein, 108 aa, Artificial Sequence
  Description of Artificial Sequence: Synthetic polypeptide
SYVLTQSPSVSAAPGYTATISCGGNNIGTKSVHWYQQKPGQAPLLVIRDDSVRPSKIPGRFSGSNSGNMATLTISGVQAGDEADFYCQVWDSDSEHVVFGGGTKLTVL

SEQ ID NO: 317 - protein, 240 aa, Artificial Sequence
  Description of Artificial Sequence: Synthetic polypeptide
EVQLVESGGGLVKPGGSLRLSCAASGFTFSDYYMSWIRQAPGKGLEWVSYISSSGSTIYYADSVKGRFTISRDNAKNSLYLQMNSLRAEDTAVYYCARDLRGAFDIWGQGTMVTVSSGGGGSGGGGSGGGGSSYVLTQSPSVSAAPGYTATISCGGNNIGTKSVHWYQQKPGQAPLLVIRDDSVRPSKIPGRFSGSNSGNMATLTISGVQAGDEADFYCQVWDSDSEHVVFGGGTKLTVL

SEQ ID NO: 318 - protein, 120 aa, Artificial Sequence
  Description of Artificial Sequence: Synthetic polypeptide
QVQLVQSGAEVKKPGASVKVSCKPSGYTVTSHYIHWVRRAPGQGLEWMGMINPSGGVTAYSQTLQGRVTMTSDTSSSTVYMELSSLRSEDTAMYYCAREGSGSGWYFDFWGRGTLVTVSS

SEQ ID NO: 319 - protein, 106 aa, Artificial Sequence
  Description of Artificial Sequence: Synthetic polypeptide
SYVLTQPPSVSVSPGQTASITCSGDGLSKKYVSWYQQKAGQSPVVLISRDKERPSGIPDRFSGSNSADTATLTISGTQAMDEADYYCQAWDDTTVVFGGGTKLTVL

SEQ ID NO: 320 - protein, 241 aa, Artificial Sequence
  Description of Artificial Sequence: Synthetic polypeptide
QVQLVQSGAEVKKPGASVKVSCKPSGYTVTSHYIHWVRRAPGQGLEWMGMINPSGGVTAYSQTLQGRVTMTSDTSSSTVYMELSSLRSEDTAMYYCAREGSGSGWYFDFWGRGTLVTVSSGGGGSGGGGSGGGGSSYVLTQPPSVSVSPGQTASITCSGDGLSKKYVSWYQQKAGQSPVVLISRDKERPSGIPDRFSGSNSADTATLTISGTQAMDEADYYCQAWDDTTVVFGGGTKLTVL

SEQ ID NO: 321 - protein, 123 aa, Artificial Sequence
  Description of Artificial Sequence: Synthetic polypeptide
QVQLQESGPGLVKPSQTLSLTCTVSGGSISSGGYYWSWIRQHPGKGLEWIGYIYYSGSTYYNPSLKSRVTISVDTSKNQFSLKLSSVTAADTAVYYCARAGIAARLRGAFDIWGQGTMVTVSS

SEQ ID NO: 322 - protein, 107 aa, Artificial Sequence
  Description of Artificial Sequence: Synthetic polypeptide
DIVMTQSPSSVSASVGDRVIITCRASQGIRNWLAWYQQKPGKAPNLLIYAASNLQSGVPSRFSGSGSGADFTLTISSLQPEDVATYYCQKYNSAPFTFGPGTKVDIK

SEQ ID NO: 323 - protein, 245 aa, Artificial Sequence
  Description of Artificial Sequence: Synthetic polypeptide
QVQLQESGPGLVKPSQTLSLTCTVSGGSISSGGYYWSWIRQHPGKGLEWIGYIYYSGSTYYNPSLKSRVTISVDTSKNQFSLKLSSVTAADTAVYYCARAGIAARLRGAFDIWGQGTMVTVSSGGGGSGGGGSGGGGSDIVMTQSPSSVSASVGDRVIITCRASQGIRNWLAWYQQKPGKAPNLLIYAASNLQSGVPSRFSGSGSGADFTLTISSLQPEDVATYYCQKYNSAPFTFGPGTKVDIK

SEQ ID NO: 324 - protein, 129 aa, Artificial Sequence
  Description of Artificial Sequence: Synthetic polypeptide
QVQLVQSGAEVKKPGSSVKVSCKASGGTFSSYAISWVRQAPGQGLEWMGGIIPIFGTANYAQKFQGRVTITADESTSTAYMELSSLRSEDTAVYYCARRGGYQLLRWDVGLLRSAFDIWGQGTMVTVSS

SEQ ID NO: 325 - protein, 109 aa, Artificial Sequence
  Description of Artificial Sequence: Synthetic polypeptide
SYVLTQPPSVSVAPGQTARITCGGNNIGSKSVHWYQQKPGQAPVLVLYGKNNRPSGVPDRFSGSRSGTTASLTITGAQAEDEADYYCSSRDSSGDHLRVFGTGTKVTVL

SEQ ID NO: 326 - protein, 253 aa, Artificial Sequence
  Description of Artificial Sequence: Synthetic polypeptide
QVQLVQSGAEVKKPGSSVKVSCKASGGTFSSYAISWVRQAPGQGLEWMGGIIPIFGTANYAQKFQGRVTITADESTSTAYMELSSLRSEDTAVYYCARRGGYQLLRWDVGLLRSAFDIWGQGTMVTVSSGGGGSGGGGSGGGGSSYVLTQPPSVSVAPGQTARITCGGNNIGSKSVHWYQQKPGQAPVLVLYGKNNRPSGVPDRFSGSRSGTTASLTITGAQAEDEADYYCSSRDSSGDHLRVFGTGTKVTVL

SEQ ID NO: 327 - protein, 125 aa, Artificial Sequence
  Description of Artificial Sequence: Synthetic polypeptide
EVQLQQSGPGLVKPSQTLSLTCAISGDSVSSNSAAWNWIRQSPSRGLEWLGRTYYRSKWYSFYAISLKSRIIINPDTSKNQFSLQLKSVTPEDTAVYYCARSSPEGLFLYWFDPWGQGTLVTVSS

SEQ ID NO: 328 - protein, 108 aa, Artificial Sequence
  Description of Artificial Sequence: Synthetic polypeptide
SSELTQDPAVSVALGQTIRITCQGDSLGNYYATWYQQKPGQAPVLVIYGTNNRPSGIPDRFSASSSGNTASLTITGAQAEDEADYYCNSRDSSGHHLLFGTGTKVTVL

SEQ ID NO: 329 - protein, 248 aa, Artificial Sequence
  Description of Artificial Sequence: Synthetic polypeptide
EVQLQQSGPGLVKPSQTLSLTCAISGDSVSSNSAAWNWIRQSPSRGLEWLGRTYYRSKWYSFYAISLKSRIIINPDTSKNQFSLQLKSVTPEDTAVYYCARSSPEGLFLYWFDPWGQGTLVTVSSGGDGSGGGGSGGGGSSSELTQDPAVSVALGQTIRITCQGDSLGNYYATWYQQKPGQAPVLVIYGTNNRPSGIPDRFSASSSGNTASLTITGAQAEDEADYYCNSRDSSGHHLLFGTGTKVTVL

SEQ ID NO: 330 - protein, 118 aa, Artificial Sequence
  Description of Artificial Sequence: Synthetic polypeptide
EVQLVESGGGLVQPGGSLRLSCAASGFTFSSYAMSWVRQAPGKGLEWVSAISGSGGSTYYADSVKGRFTISRDNSKNTLYLQMNSLRAEDTAVYYCAKVEGSGSLDYWGQGTLVTVSS

SEQ ID NO: 331 - protein, 113 aa, Artificial Sequence
  Description of Artificial Sequence: Synthetic polypeptide
EIVMTQSPGTLSLSPGERATLSCRASQSVSSAYLAWYQQKPGQPPRLLISGASTRATGIPDRFGGSGSGTDFTLTISRLEPEDFAVYYCQHYGSSFNGSSLFTFGQGTRLEIK

SEQ ID NO: 332 - protein, 246 aa, Artificial Sequence
  Description of Artificial Sequence: Synthetic polypeptide
EVQLVESGGGLVQPGGSLRLSCAASGFTFSSYAMSWVRQAPGKGLEWVSAISGSGGSTYYADSVKGRFTISRDNSKNTLYLQMNSLRAEDTAVYYCAKVEGSGSLDYWGQGTLVTVSSGGGGSGGGGSGGGGSEIVMTQSPGTLSLSPGERATLSCRASQSVSSAYLAWYQQKPGQPPRLLISGASTRATGIPDRFGGSGSGTDFTLTISRLEPEDFAVYYCQHYGSSFNGSSLFTFGQGTRLEIK

SEQ ID NO: 333 - protein, 118 aa, Artificial Sequence
  Description of Artificial Sequence: Synthetic polypeptide
EVQLVETGGGLVQPGGSLRLSCAASGITFSRYPMSWVRQAPGKGLEWVSGISDSGVSTYYADSAKGRFTISRDNSKNTLFLQMSSLRDEDTAVYYCVTRAGSEASDIWGQGTMVTVSS

SEQ ID NO: 334 - protein, 108 aa, Artificial Sequence
  Description of Artificial Sequence: Synthetic polypeptide
EIVLTQSPATLSLSPGERATLSCRASQSVSNSLAWYQQKPGQAPRLLIYDASSRATGIPDRFSGSGSGTDFTLTISRLEPEDFAIYYCQQFGTSSGLTFGGGTKLEIK

SEQ ID NO: 335 - protein, 241 aa, Artificial Sequence
  Description of Artificial Sequence: Synthetic polypeptide
EVQLVETGGGLVQPGGSLRLSCAASGITFSRYPMSWVRQAPGKGLEWVSGISDSGVSTYYADSAKGRFTISRDNSKNTLFLQMSSLRDEDTAVYYCVTRAGSEASDIWGQGTMVTVSSGGGGSGGGGSGGGGSEIVLTQSPATLSLSPGERATLSCRASQSVSNSLAWYQQKPGQAPRLLIYDASSRATGIPDRFSGSGSGTDFTLTISRLEPEDFAIYYCQQFGTSSGLTFGGGTKLEIK

SEQ ID NO: 336 - protein, 124 aa, Artificial Sequence
  Description of Artificial Sequence: Synthetic polypeptide
QVQLVESGGGLVQPGGSLRLSCAASGFTFSSYAMSWVRQAPGKGLEWVSAISGSGGSTYYADSVKGRFTISRDNAKNSLYLQMNSLRAEDTAIYYCARATYKRELRYYYGMDVWGQGTMVTVSS

SEQ ID NO: 337 - protein, 109 aa, Artificial Sequence
  Description of Artificial Sequence: Synthetic polypeptide
EIVMTQSPGTVSLSPGERATLSCRASQSVSSSFLAWYQQKPGQAPRLLIYGASSRATGIPDRFSGSGSGTDFTLTISRLEPEDSAVYYCQQYHSSPSWTFGQGTRLEIK

SEQ ID NO: 338 - protein, 248 aa, Artificial Sequence
  Description of Artificial Sequence: Synthetic polypeptide
QVQLVESGGGLVQPGGSLRLSCAASGFTFSSYAMSWVRQAPGKGLEWVSAISGSGGSTYYADSVKGRFTISRDNAKNSLYLQMNSLRAEDTAIYYCARATYKRELRYYYGMDVWGQGTMVTVSSGGGGSGGGGSGGGGSEIVMTQSPGTVSLSPGERATLSCRASQSVSSSFLAWYQQKPGQAPRLLIYGASSRATGIPDRFSGSGSGTDFTLTISRLEPEDSAVYYCQQYHSSPSWTFGQGTRLEIK

SEQ ID NO: 339 - protein, 124 aa, Artificial Sequence
  Description of Artificial Sequence: Synthetic polypeptide
EVQLVETGGGLVQPGGSLRLSCAASGFTFSSYAMSWVRQAPGKGLEWVSAISGSGGSTYYADSVKGRFTISRDNSKNTLYLQMNTLKAEDTAVYYCARATYKRELRYYYGMDVWGQGTTVTVSS

SEQ ID NO: 340 - protein, 109 aa, Artificial Sequence
  Description of Artificial Sequence: Synthetic polypeptide
EIVLTQSPSTLSLSPGESATLSCRASQSVSTTFLAWYQQKPGQAPRLLIYGSSNRATGIPDRFSGSGSGTDFTLTIRRLEPEDFAVYYCQQYHSSPSWTFGQGTKVEIK

SEQ ID NO: 341 - protein, 248 aa, Artificial Sequence
  Description of Artificial Sequence: Synthetic polypeptide
EVQLVETGGGLVQPGGSLRLSCAASGFTFSSYAMSWVRQAPGKGLEWVSAISGSGGSTYYADSVKGRFTISRDNSKNTLYLQMNTLKAEDTAVYYCARATYKRELRYYYGMDVWGQGTTVTVSSGGGGSGGGGSGGGGSEIVLTQSPSTLSLSPGESATLSCRASQSVSTTFLAWYQQKPGQAPRLLIYGSSNRATGIPDRFSGSGSGTDFTLTIRRLEPEDFAVYYCQQYHSSPSWTFGQGTKVEIK

SEQ ID NO: 342 - protein, 117 aa, Artificial Sequence
  Description of Artificial Sequence: Synthetic polypeptide
EVQLVETGGGLVQPGRSLRLSCAASGFTFDDYAMHWVRQAPGKGLEWVSGISWNSGSIGYADSVKGRFTISRDNAKNSLYLQMNSLRDEDTAVYYCARVGKAVPDVWGQGTTVTVSS

SEQ ID NO: 343 - protein, 107 aa, Artificial Sequence
  Description of Artificial Sequence: Synthetic polypeptide
DIVMTQTPSSLSASVGDRVTITCRASQSISSYLNWYQQKPGKAPKLLIYAASSLQSGVPSRFSGSGSGTDFTLTISSLQPEDFATYYCQQSYSTPYSFGQGTRLEIK

SEQ ID NO: 344 - protein, 239 aa, Artificial Sequence
  Description of Artificial Sequence: Synthetic polypeptide
EVQLVETGGGLVQPGRSLRLSCAASGFTFDDYAMHWVRQAPGKGLEWVSGISWNSGSIGYADSVKGRFTISRDNAKNSLYLQMNSLRDEDTAVYYCARVGKAVPDVWGQGTTVTVSSGGGGSGGGGSGGGGSDIVMTQTPSSLSASVGDRVTITCRASQSISSYLNWYQQKPGKAPKLLIYAASSLQSGVPSRFSGSGSGTDFTLTISSLQPEDFATYYCQQSYSTPYSFGQGTRLEIK

SEQ ID NO: 345 - protein, 122 aa, Artificial Sequence
  Description of Artificial Sequence: Synthetic polypeptide
EVQLVESGGGLVQPGRSLRLSCTASGFTFDDYAMHWVRQRPGKGLEWVASINWKGNSLAYGDSVKGRFAISRDNAKNTVFLQMNSLRTEDTAVYYCASHQGVAYYNYAMDVWGRGTLVTVSS

SEQ ID NO: 346 - protein, 109 aa, Artificial Sequence
  Description of Artificial Sequence: Synthetic polypeptide
EIVLTQSPGTLSLSPGERATLSCRATQSIGSSFLAWYQQRPGQAPRLLIYGASQRATGIPDRFSGRGSGTDFTLTISRVEPEDSAVYYCQHYESSPSWTFGQGTKVEIK

SEQ ID NO: 347 - protein, 246 aa, Artificial Sequence
  Description of Artificial Sequence: Synthetic polypeptide
EVQLVESGGGLVQPGRSLRLSCTASGFTFDDYAMHWVRQRPGKGLEWVASINWKGNSLAYGDSVKGRFAISRDNAKNTVFLQMNSLRTEDTAVYYCASHQGVAYYNYAMDVWGRGTLVTVSSGGGGSGGGGSGGGGSEIVLTQSPGTLSLSPGERATLSCRATQSIGSSFLAWYQQRPGQAPRLLIYGASQRATGIPDRFSGRGSGTDFTLTISRVEPEDSAVYYCQHYESSPSWTFGQGTKVEIK

SEQ ID NO: 348 - protein, 117 aa, Artificial Sequence
  Description of Artificial Sequence: Synthetic polypeptide
EVQLVESGGGLVQPGGSLRLSCAASGFTFSSYAMSWVRQAPGKGLEWVSAISGSGGSTYYADSVKGRFTISRDNSKNTLYLQMNSLRAEDTAVYYCAKVVRDGMDVWGQGTTVTVSS

SEQ ID NO: 349 - protein, 109 aa, Artificial Sequence
  Description of Artificial Sequence: Synthetic polypeptide
EIVLTQSPATLSLSPGERATLSCRASQSVSSSYLAWYQQKPGQAPRLLIYGASSRATGIPDRFSGNGSGTDFTLTISRLEPEDFAVYYCQQYGSPPRFTFGPGTKVDIK

SEQ ID NO: 350 - protein, 241 aa, Artificial Sequence
  Description of Artificial Sequence: Synthetic polypeptide
EVQLVESGGGLVQPGGSLRLSCAASGFTFSSYAMSWVRQAPGKGLEWVSAISGSGGSTYYADSVKGRFTISRDNSKNTLYLQMNSLRAEDTAVYYCAKVVRDGMDVWGQGTTVTVSSGGGGSGGGGSGGGGSEIVLTQSPATLSLSPGERATLSCRASQSVSSSYLAWYQQKPGQAPRLLIYGASSRATGIPDRFSGNGSGTDFTLTISRLEPEDFAVYYCQQYGSPPRFTFGPGTKVDIK

SEQ ID NO: 351 - protein, 118 aa, Artificial Sequence
  Description of Artificial Sequence: Synthetic polypeptide
EVQLLESGGGLVQPGGSLRLSCAASGFTFSSYAMSWVRQAPGKGLEWVSAISGSGGSTYYADSVKGRFTISRDNSKNTLYLQMNSLRAEDTAVYYCAKIPQTGTFDYWGQGTLVTVSS

SEQ ID NO: 352 - protein, 109 aa, Artificial Sequence
  Description of Artificial Sequence: Synthetic polypeptide
EIVLTQSPGTLSLSPGERATLSCRASQSVSSSYLAWYQQRPGQAPRLLIYGASSRATGIPDRFSGSGSGTDFTLTISRLEPEDFAVYYCQHYGSSPSWTFGQGTRLEIK

SEQ ID NO: 353 - protein, 242 aa, Artificial Sequence
  Description of Artificial Sequence: Synthetic polypeptide
EVQLLESGGGLVQPGGSLRLSCAASGFTFSSYAMSWVRQAPGKGLEWVSAISGSGGSTYYADSVKGRFTISRDNSKNTLYLQMNSLRAEDTAVYYCAKIPQTGTFDYWGQGTLVTVSSGGGGSGGGGSGGGGSEIVLTQSPGTLSLSPGERATLSCRASQSVSSSYLAWYQQRPGQAPRLLIYGASSRATGIPDRFSGSGSGTDFTLTISRLEPEDFAVYYCQHYGSSPSWTFGQGTRLEIK

SEQ ID NO: 354 - protein, 124 aa, Artificial Sequence
  Description of Artificial Sequence: Synthetic polypeptide
EVQLVETGGGLVQPGGSLRLSCAASGFTFSSYAMSWVRQAPGKGLEWVSAISGSGGSTYYADSVKGRFTMSRENDKNSVFLQMNSLRVEDTGVYYCARANYKRELRYYYGMDVWGQGTMVTVSS

SEQ ID NO: 355 - protein, 109 aa, Artificial Sequence
  Description of Artificial Sequence: Synthetic polypeptide
EIVMTQSPGTLSLSPGESATLSCRASQRVASNYLAWYQHKPGQAPSLLISGASSRATGVPDRFSGSGSGTDFTLAISRLEPEDSAVYYCQHYDSSPSWTFGQGTKVEIK

SEQ ID NO: 356 - protein, 248 aa, Artificial Sequence
  Description of Artificial Sequence: Synthetic polypeptide
EVQLVETGGGLVQPGGSLRLSCAASGFTFSSYAMSWVRQAPGKGLEWVSAISGSGGSTYYADSVKGRFTMSRENDKNSVFLQMNSLRVEDTGVYYCARANYKRELRYYYGMDVWGQGTMVTVSSGGGGSGGGGSGGGGSEIVMTQSPGTLSLSPGESATLSCRASQRVASNYLAWYQHKPGQAPSLLISGASSRATGVPDRFSGSGSGTDFTLAISRLEPEDSAVYYCQHYDSSPSWTFGQGTKVEIK

SEQ ID NO: 357 - protein, 120 aa, Artificial Sequence
  Description of Artificial Sequence: Synthetic polypeptide
EVQLLETGGGLVQPGGSLRLSCAASGFSFSSYAMSWVRQAPGKGLEWVSAISGSGGSTYYADSVKGRFTISRDNSKNTLYLQMNSLRAEDTAVYYCAKALVGATGAFDIWGQGTLVTVSS

SEQ ID NO: 358 - protein, 109 aa, Artificial Sequence
  Description of Artificial Sequence: Synthetic polypeptide
EIVLTQSPGTLSLSPGERATLSCRASQSLSSNFLAWYQQKPGQAPGLLIYGASNWATGTPDRFSGSGSGTDFTLTITRLEPEDFAVYYCQYYGTSPMYTFGQGTKVEIK

SEQ ID NO: 359 - protein, 244 aa, Artificial Sequence
  Description of Artificial Sequence: Synthetic polypeptide
EVQLLETGGGLVQPGGSLRLSCAASGFSFSSYAMSWVRQAPGKGLEWVSAISGSGGSTYYADSVKGRFTISRDNSKNTLYLQMNSLRAEDTAVYYCAKALVGATGAFDIWGQGTLVTVSSGGGGSGGGGSGGGGSEIVLTQSPGTLSLSPGERATLSCRASQSLSSNFLAWYQQKPGQAPGLLIYGASNWATGTPDRFSGSGSGTDFTLTITRLEPEDFAVYYCQYYGTSPMYTFGQGTKVEIK

SEQ ID NO: 360 - protein, 117 aa, Artificial Sequence
  Description of Artificial Sequence: Synthetic polypeptide
EVQLLESGGGLVQPGGSLRLSCAASGFTFSSYAMSWVRQAPGKGLEWVSAISGSGGSTYYADSVKGRFTISRDNSKNTLYLQMNSLRAEDTAVYYCVLWFGEGFDPWGQGTLVTVSS

SEQ ID NO: 361 - protein, 112 aa, Artificial Sequence
  Description of Artificial Sequence: Synthetic polypeptide
DIVLTQSPLSLPVTPGEPASISCRSSQSLLHSNGYNYLDWYLQKPGQSPQLLIYLGSNRASGVPDRFSGSGSGTDFTLKISRVEAEDVGVYYCMQALQTPLTFGGGTKVDIK

SEQ ID NO: 362 - protein, 244 aa, Artificial Sequence
  Description of Artificial Sequence: Synthetic polypeptide
EVQLLESGGGLVQPGGSLRLSCAASGFTFSSYAMSWVRQAPGKGLEWVSAISGSGGSTYYADSVKGRFTISRDNSKNTLYLQMNSLRAEDTAVYYCVLWFGEGFDPWGQGTLVTVSSGGGGSGGGGSGGGGSDIVLTQSPLSLPVTPGEPASISCRSSQSLLHSNGYNYLDWYLQKPGQSPQLLIYLGSNRASGVPDRFSGSGSGTDFTLKISRVEAEDVGVYYCMQALQTPLTFGGGTKVDIK

SEQ ID NO: 363 - protein, 126 aa, Artificial Sequence
  Description of Artificial Sequence: Synthetic polypeptide
QVQLVESGGGLVQPGGSLRLSCAASGFTFSSYAMSWVRQAPGKGLEWVSAISGSGGSTYYADSVKGRFTISRDNSKNTLYLQMNSLRAEDTAVYYCAKVGYDSSGYYRDYYGMDVWGQGTTVTVSS

SEQ ID NO: 364 - protein, 110 aa, Artificial Sequence
  Description of Artificial Sequence: Synthetic polypeptide
EIVLTQSPGTLSLSPGERATLSCRASQSVSSSYLAWYQQKPGQAPRLLIYGTSSRATGISDRFSGSGSGTDFTLTISRLEPEDFAVYYCQHYGNSPPKFTFGPGTKLEIK

SEQ ID NO: 365 - protein, 251 aa, Artificial Sequence
  Description of Artificial Sequence: Synthetic polypeptide
QVQLVESGGGLVQPGGSLRLSCAASGFTFSSYAMSWVRQAPGKGLEWVSAISGSGGSTYYADSVKGRFTISRDNSKNTLYLQMNSLRAEDTAVYYCAKVGYDSSGYYRDYYGMDVWGQGTTVTVSSGGGGSGGGGSGGGGSEIVLTQSPGTLSLSPGERATLSCRASQSVSSSYLAWYQQKPGQAPRLLIYGTSSRATGISDRFSGSGSGTDFTLTISRLEPEDFAVYYCQHYGNSPPKFTFGPGTKLEIK

SEQ ID NO: 366 - protein, 122 aa, Artificial Sequence
  Description of Artificial Sequence: Synthetic polypeptide
EVQLVESGGGLVQPGGSLRLSCAASGFTFSSYAMSWVRQAPGKGLEWVSAISGSGGSTYYADSVKGRFTISRDNSKNTLYLQMNSLRAEDTAVYYCAKMGWSSGYLGAFDIWGQGTTVTVSS

SEQ ID NO: 367 - protein, 109 aa, Artificial Sequence
  Description of Artificial Sequence: Synthetic polypeptide
EIVLTQSPGTLSLSPGERATLSCRASQSVASSFLAWYQQKPGQAPRLLIYGASGRATGIPDRFSGSGSGTDFTLTISRLEPEDFAVYYCQHYGGSPRLTFGGGTKVDIK

SEQ ID NO: 368 - protein, 246 aa, Artificial Sequence
  Description of Artificial Sequence: Synthetic polypeptide
EVQLVESGGGLVQPGGSLRLSCAASGFTFSSYAMSWVRQAPGKGLEWVSAISGSGGSTYYADSVKGRFTISRDNSKNTLYLQMNSLRAEDTAVYYCAKMGWSSGYLGAFDIWGQGTTVTVSSGGGGSGGGGSGGGGSEIVLTQSPGTLSLSPGERATLSCRASQSVASSFLAWYQQKPGQAPRLLIYGASGRATGIPDRFSGSGSGTDFTLTISRLEPEDFAVYYCQHYGGSPRLTFGGGTKVDIK

SEQ ID NO: 369 - protein, 122 aa, Artificial Sequence
  Description of Artificial Sequence: Synthetic polypeptide
QIQLVQSGPDLKKPGETVKLSCKASGYTFTNFGMNWVKQAPGKGFKWMAWINTYTGESYFADDFKGRFAFSVETSATTAYLQINNLKTEDTATYFCARGEIYYGYDGGFAYWGQGTLVTVSA

SEQ ID NO: 370 - protein, 107 aa, Artificial Sequence
  Description of Artificial Sequence: Synthetic polypeptide
DVVMTQSHRFMSTSVGDRVSITCRASQDVNTAVSWYQQKPGQSPKLLIFSASYRYTGVPDRFTGSGSGADFTLTISSVQAEDLAVYYCQQHYSTPWTFGGGTKLDIK

SEQ ID NO: 371 - protein, 244 aa, Artificial Sequence
  Description of Artificial Sequence: Synthetic polypeptide
QIQLVQSGPDLKKPGETVKLSCKASGYTFTNFGMNWVKQAPGKGFKWMAWINTYTGESYFADDFKGRFAFSVETSATTAYLQINNLKTEDTATYFCARGEIYYGYDGGFAYWGQGTLVTVSAGGGGSGGGGSGGGGSDVVMTQSHRFMSTSVGDRVSITCRASQDVNTAVSWYQQKPGQSPKLLIFSASYRYTGVPDRFTGSGSGADFTLTISSVQAEDLAVYYCQQHYSTPWTFGGGTKLDIK

SEQ ID NO: 372 - protein, 117 aa, Artificial Sequence
  Description of Artificial Sequence: Synthetic polypeptide
QIQLVQSGPELKKPGETVKISCKASGYTFTDYSINWVKRAPGKGLKWMGWINTETREPAYAYDFRGRFAFSLETSASTAYLQINNLKYEDTATYFCALDYSYAMDYWGQGTSVTVSS

SEQ ID NO: 373 - protein, 111 aa, Artificial Sequence
  Description of Artificial Sequence: Synthetic polypeptide
DIVLTQSPASLAMSLGKRATISCRASESVSVIGAHLIHWYQQKPGQPPKLLIYLASNLETGVPARFSGSGSGTDFTLTIDPVEEDDVAIYSCLQSRIFPRTFGGGTKLEIK

SEQ ID NO: 374 - protein, 249 aa, Artificial Sequence
  Description of Artificial Sequence: Synthetic polypeptide
QIQLVQSGPELKKPGETVKISCKASGYTFTDYSINWVKRAPGKGLKWMGWINTETREPAYAYDFRGRFAFSLETSASTAYLQINNLKYEDTATYFCALDYSYAMDYWGQGTSVTVSSGGGGSGGGGSGGGGSQIQLVQSGPELKKPGETVKISCKASGYTFTDYSINWVKRAPGKGLKWMGWINTETREPAYAYDFRGRFAFSLETSASTAYLQINNLKYEDTATYFCALDYSYAMDYWGQGTSVTVSS

SEQ ID NO: 375 - protein, 117 aa, Artificial Sequence
  Description of Artificial Sequence: Synthetic polypeptide
QIQLVQSGPELKKPGETVKISCKASGYTFRHYSMNWVKQAPGKGLKWMGRINTESGVPIYADDFKGRFAFSVETSASTAYLVINNLKDEDTASYFCSNDYLYSLDFWGQGTALTVSS

SEQ ID NO: 376 - protein, 111 aa, Artificial Sequence
  Description of Artificial Sequence: Synthetic polypeptide
DIVLTQSPPSLAMSLGKRATISCRASESVTILGSHLIYWYQQKPGQPPTLLIQLASNVQTGVPARFSGSGSRTDFTLTIDPVEEDDVAVYYCLQSRTIPRTFGGGTKLEIK

SEQ ID NO: 377 - protein, 243 aa, Artificial Sequence
  Description of Artificial Sequence: Synthetic polypeptide
QIQLVQSGPELKKPGETVKISCKASGYTFRHYSMNWVKQAPGKGLKWMGRINTESGVPIYADDFKGRFAFSVETSASTAYLVINNLKDEDTASYFCSNDYLYSLDFWGQGTALTVSSGGGGSGGGGSGGGGSDIVLTQSPPSLAMSLGKRATISCRASESVTILGSHLIYWYQQKPGQPPTLLIQLASNVQTGVPARFSGSGSRTDFTLTIDPVEEDDVAVYYCLQSRTIPRTFGGGTKLEIK

SEQ ID NO: 378 - protein, 117 aa, Artificial Sequence
  Description of Artificial Sequence: Synthetic polypeptide
QIQLVQSGPELKKPGETVKISCKASGYTFTHYSMNWVKQAPGKGLKWMGRINTETGEPLYADDFKGRFAFSLETSASTAYLVINNLKNEDTATFFCSNDYLYSCDYWGQGTTLTVSS

SEQ ID NO: 379 - protein, 243 aa, Artificial Sequence
  Description of Artificial Sequence: Synthetic polypeptide
QIQLVQSGPELKKPGETVKISCKASGYTFTHYSMNWVKQAPGKGLKWMGRINTETGEPLYADDFKGRFAFSLETSASTAYLVINNLKNEDTATFFCSNDYLYSCDYWGQGTTLTVSSGGGGSGGGGSGGGGSDIVLTQSPPSLAMSLGKRATISCRASESVTILGSHLIYWYQQKPGQPPTLLIQLASNVQTGVPARFSGSGSRTDFTLTIDPVEEDDVAVYYCLQSRTIPRTFGGGTKLEIK

SEQ ID NO: 380 - protein, 11 aa, Artificial Sequence
  Description of Artificial Sequence: Synthetic peptide
RASQSISSYLN

SEQ ID NO: 381 - protein, 12 aa, Artificial Sequence
  Description of Artificial Sequence: Synthetic peptide
RASQSISSSFLA

SEQ ID NO: 382 - protein, 16 aa, Artificial Sequence
  Description of Artificial Sequence: Synthetic peptide
RSSQSLLHSNGYNYLD

SEQ ID NO: 383 - protein, 16 aa, Artificial Sequence
  Description of Artificial Sequence: Synthetic peptide
KSSQSLLRNDGKTPLY

SEQ ID NO: 384 - protein, 16 aa, Artificial Sequence
  Description of Artificial Sequence: Synthetic peptide
RSSQSLLHSNGYNYLN

SEQ ID NO: 385 - protein, 16 aa, Artificial Sequence
  Description of Artificial Sequence: Synthetic peptide
RSSQSLLYSNGYNYVD

SEQ ID NO: 386 - protein, 11 aa, Artificial Sequence
  Description of Artificial Sequence: Synthetic peptide
RASQSVSSNLA

SEQ ID NO: 387 - protein, 11 aa, Artificial Sequence
  Description of Artificial Sequence: Synthetic peptide
RASQSVSSKLA

SEQ ID NO: 388 - protein, 12 aa, Artificial Sequence
  Description of Artificial Sequence: Synthetic peptide
RASQSVGSTNLA

SEQ ID NO: 389 - protein, 16 aa, Artificial Sequence
  Description of Artificial Sequence: Synthetic peptide
KSSESLVHNSGKTYLN

SEQ ID NO: 390 - protein, 11 aa, Artificial Sequence
  Description of Artificial Sequence: Synthetic peptide
QASEDINKFLN

SEQ ID NO: 391 - protein, 11 aa, Artificial Sequence
  Description of Artificial Sequence: Synthetic peptide
RASQSVGSNLA

SEQ ID NO: 392 - protein, 12 aa, Artificial Sequence
  Description of Artificial Sequence: Synthetic peptide
RASQSIGSSSLA

SEQ ID NO: 393 - protein, 11 aa, Artificial Sequence
  Description of Artificial Sequence: Synthetic peptide
KASQDIDDAMN

SEQ ID NO: 394 - protein, 11 aa, Artificial Sequence
  Description of Artificial Sequence: Synthetic peptide
RASQDIYNNLA

SEQ ID NO: 395 - protein, 11 aa, Artificial Sequence
  Description of Artificial Sequence: Synthetic peptide
GGNNIGTKSVH

SEQ ID NO: 396 - protein, 11 aa, Artificial Sequence
  Description of Artificial Sequence: Synthetic peptide
SGDGLSKKYVS

SEQ ID NO: 397 - protein, 11 aa, Artificial Sequence
  Description of Artificial Sequence: Synthetic peptide
RASQGIRNWLA

SEQ ID NO: 398 - protein, 11 aa, Artificial Sequence
  Description of Artificial Sequence: Synthetic peptide
GGNNIGSKSVH

SEQ ID NO: 399 - protein, 11 aa, Artificial Sequence
  Description of Artificial Sequence: Synthetic peptide
QGDSLGNYYAT

SEQ ID NO: 400 - protein, 12 aa, Artificial Sequence
  Description of Artificial Sequence: Synthetic peptide
RASQSVSSAYLA

SEQ ID NO: 401 - protein, 11 aa, Artificial Sequence
  Description of Artificial Sequence: Synthetic peptide
RASQSVSNSLA

SEQ ID NO: 402 - protein, 12 aa, Artificial Sequence
  Description of Artificial Sequence: Synthetic peptide
RASQSVSSSFLA

SEQ ID NO: 403 - protein, 12 aa, Artificial Sequence
  Description of Artificial Sequence: Synthetic peptide
RASQSVSTTFLA

SEQ ID NO: 404 - protein, 12 aa, Artificial Sequence
  Description of Artificial Sequence: Synthetic peptide
RATQSIGSSFLA

SEQ ID NO: 405 - protein, 12 aa, Artificial Sequence
  Description of Artificial Sequence: Synthetic peptide
RASQSVSSSYLA

SEQ ID NO: 406 - protein, 12 aa, Artificial Sequence
  Description of Artificial Sequence: Synthetic peptide
RASQRVASNYLA

SEQ ID NO: 407 - protein, 12 aa, Artificial Sequence
  Description of Artificial Sequence: Synthetic peptide
RASQSLSSNFLA

SEQ ID NO: 408 - protein, 12 aa, Artificial Sequence
  Description of Artificial Sequence: Synthetic peptide
RASQSVASSFLA

SEQ ID NO: 409 - protein, 11 aa, Artificial Sequence
  Description of Artificial Sequence: Synthetic peptide
RASQDVNTAVS

SEQ ID NO: 410 - protein, 15 aa, Artificial Sequence
  Description of Artificial Sequence: Synthetic peptide
RASESVSVIGAHLIH

SEQ ID NO: 411 - protein, 15 aa, Artificial Sequence
  Description of Artificial Sequence: Synthetic peptide
RASESVTILGSHLIY

SEQ ID NO: 412 - protein, 7 aa, Artificial Sequence
  Description of Artificial Sequence: Synthetic peptide
AASSLQS

SEQ ID NO: 413 - protein, 7 aa, Artificial Sequence
  Description of Artificial Sequence: Synthetic peptide
GASRRAT

SEQ ID NO: 414 - protein, 7 aa, Artificial Sequence
  Description of Artificial Sequence: Synthetic peptide
LGSNRAS

SEQ ID NO: 415 - protein, 7 aa, Artificial Sequence
  Description of Artificial Sequence: Synthetic peptide
EVSNRFS

SEQ ID NO: 416 - protein, 7 aa, Artificial Sequence
  Description of Artificial Sequence: Synthetic peptide
LGSKRAS

SEQ ID NO: 417 - protein, 7 aa, Artificial Sequence
  Description of Artificial Sequence: Synthetic peptide
GASTLAS

SEQ ID NO: 418 - protein, 7 aa, Artificial Sequence
  Description of Artificial Sequence: Synthetic peptide
GASTRAS

SEQ ID NO: 419 - protein, 7 aa, Artificial Sequence
  Description of Artificial Sequence: Synthetic peptide
GASIRAT

SEQ ID NO: 420 - protein, 7 aa, Artificial Sequence
  Description of Artificial Sequence: Synthetic peptide
EVSNRDS

SEQ ID NO: 421 - protein, 7 aa, Artificial Sequence
  Description of Artificial Sequence: Synthetic peptide
DASTLQT

SEQ ID NO: 422 - protein, 7 aa, Artificial Sequence
  Description of Artificial Sequence: Synthetic peptide
GASTRAT

SEQ ID NO: 423 - protein, 7 aa, Artificial Sequence
  Description of Artificial Sequence: Synthetic peptide
GASSRAS

SEQ ID NO: 424 - protein, 7 aa, Artificial Sequence
  Description of Artificial Sequence: Synthetic peptide
SATSPVP

SEQ ID NO: 425 - protein, 7 aa, Artificial Sequence
  Description of Artificial Sequence: Synthetic peptide
AANKSQS

SEQ ID NO: 426 - protein, 7 aa, Artificial Sequence
  Description of Artificial Sequence: Synthetic peptide
DDSVRPS

SEQ ID NO: 427 - protein, 7 aa, Artificial Sequence
  Description of Artificial Sequence: Synthetic peptide
RDKERPS

SEQ ID NO: 428 - protein, 7 aa, Artificial Sequence
  Description of Artificial Sequence: Synthetic peptide
AASNLQS

SEQ ID NO: 429 - protein, 7 aa, Artificial Sequence
  Description of Artificial Sequence: Synthetic peptide
GKNNRPS

SEQ ID NO: 430 - protein, 7 aa, Artificial Sequence
  Description of Artificial Sequence: Synthetic peptide
GTNNRPS

SEQ ID NO: 431 - protein, 7 aa, Artificial Sequence
  Description of Artificial Sequence: Synthetic peptide
DASSRAT

SEQ ID NO: 432 - protein, 7 aa, Artificial Sequence
  Description of Artificial Sequence: Synthetic peptide
GASSRAT

SEQ ID NO: 433 - protein, 7 aa, Artificial Sequence
  Description of Artificial Sequence: Synthetic peptide
GSSNRAT

SEQ ID NO: 434 - protein, 7 aa, Artificial Sequence
  Description of Artificial Sequence: Synthetic peptide
GASQRAT

SEQ ID NO: 435 - protein, 7 aa, Artificial Sequence
  Description of Artificial Sequence: Synthetic peptide
GASNWAT

SEQ ID NO: 436 - protein, 7 aa, Artificial Sequence
  Description of Artificial Sequence: Synthetic peptide
GTSSRAT

SEQ ID NO: 437 - protein, 7 aa, Artificial Sequence
  Description of Artificial Sequence: Synthetic peptide
GASGRAT

SEQ ID NO: 438 - protein, 7 aa, Artificial Sequence
  Description of Artificial Sequence: Synthetic peptide
SASYRYT

SEQ ID NO: 439 - protein, 7 aa, Artificial Sequence
  Description of Artificial Sequence: Synthetic peptide
LASNLET

SEQ ID NO: 440 - protein, 7 aa, Artificial Sequence
  Description of Artificial Sequence: Synthetic peptide
LASNVQT

SEQ ID NO: 441 - protein, 9 aa, Artificial Sequence
  Description of Artificial Sequence: Synthetic peptide
QQSYSTPYT

SEQ ID NO: 442 - protein, 10 aa, Artificial Sequence
  Description of Artificial Sequence: Synthetic peptide
QQYHSSPSWT

SEQ ID NO: 443 - protein, 9 aa, Artificial Sequence
  Description of Artificial Sequence: Synthetic peptide
MQALQTPYT

SEQ ID NO: 444 - protein, 8 aa, Artificial Sequence
  Description of Artificial Sequence: Synthetic peptide
MQNIQFPS

SEQ ID NO: 445 - protein, 8 aa, Artificial Sequence
  Description of Artificial Sequence: Synthetic peptide
QQSYKRAS

SEQ ID NO: 446 - protein, 9 aa, Artificial Sequence
  Description of Artificial Sequence: Synthetic peptide
MQGRQFPYS

SEQ ID NO: 447 - protein, 8 aa, Artificial Sequence
  Description of Artificial Sequence: Synthetic peptide
QQYGSSLT

SEQ ID NO: 448 - protein, 9 aa, Artificial Sequence
  Description of Artificial Sequence: Synthetic peptide
QQYGSSSWT

SEQ ID NO: 449 - protein, 10 aa, Artificial Sequence
  Description of Artificial Sequence: Synthetic peptide
QQYGSSPPWT

SEQ ID NO: 450 - protein, 7 aa, Artificial Sequence
  Description of Artificial Sequence: Synthetic peptide
QQSYTLA

SEQ ID NO: 451 - protein, 9 aa, Artificial Sequence
  Description of Artificial Sequence: Synthetic peptide
MQGTHWPGT

SEQ ID NO: 452 - protein, 9 aa, Artificial Sequence
  Description of Artificial Sequence: Synthetic peptide
QQYESLPLT

SEQ ID NO: 453 - protein, 10 aa, Artificial Sequence
  Description of Artificial Sequence: Synthetic peptide
QQYNDWLPVT

SEQ ID NO: 454 - protein, 10 aa, Artificial Sequence
  Description of Artificial Sequence: Synthetic peptide
QQYAGSPPFT

SEQ ID NO: 455 - protein, 9 aa, Artificial Sequence
  Description of Artificial Sequence: Synthetic peptide
LQHDNFPLT

SEQ ID NO: 456 - protein, 9 aa, Artificial Sequence
  Description of Artificial Sequence: Synthetic peptide
QHYYRFPYS

SEQ ID NO: 457 - protein, 11 aa, Artificial Sequence
  Description of Artificial Sequence: Synthetic peptide
QVWDSDSEHVV

SEQ ID NO: 458 - protein, 9 aa, Artificial Sequence
  Description of Artificial Sequence: Synthetic peptide
QAWDDTTVV

SEQ ID NO: 459 - protein, 9 aa, Artificial Sequence
  Description of Artificial Sequence: Synthetic peptide
QKYNSAPFT

SEQ ID NO: 460 - protein, 12 aa, Artificial Sequence
  Description of Artificial Sequence: Synthetic peptide
SSRDSSGDHLRV

SEQ ID NO: 461 - protein, 11 aa, Artificial Sequence
  Description of Artificial Sequence: Synthetic peptide
NSRDSSGHHLL

SEQ ID NO: 462 - protein, 14 aa, Artificial Sequence
  Description of Artificial Sequence: Synthetic peptide
QHYGSSFNGSSLFT

SEQ ID NO: 463 - protein, 10 aa, Artificial Sequence
  Description of Artificial Sequence: Synthetic peptide
QQFGTSSGLT

SEQ ID NO: 464 - protein, 9 aa, Artificial Sequence
  Description of Artificial Sequence: Synthetic peptide
QQSYSTPYS

SEQ ID NO: 465 - protein, 10 aa, Artificial Sequence
  Description of Artificial Sequence: Synthetic peptide
QHYESSPSWT

SEQ ID NO: 466 - protein, 10 aa, Artificial Sequence
  Description of Artificial Sequence: Synthetic peptide
QQYGSPPRFT

SEQ ID NO: 467 - protein, 10 aa, Artificial Sequence
  Description of Artificial Sequence: Synthetic peptide
QHYGSSPSWT

SEQ ID NO: 468 - protein, 10 aa, Artificial Sequence
  Description of Artificial Sequence: Synthetic peptide
QHYDSSPSWT

SEQ ID NO: 469 - protein, 10 aa, Artificial Sequence
  Description of Artificial Sequence: Synthetic peptide
QYYGTSPMYT

SEQ ID NO: 470 - protein, 9 aa, Artificial Sequence
  Description of Artificial Sequence: Synthetic peptide
MQALQTPLT

SEQ ID NO: 471 - protein, 11 aa, Artificial Sequence
  Description of Artificial Sequence: Synthetic peptide
QHYGNSPPKFT

SEQ ID NO: 472 - protein, 10 aa, Artificial Sequence
  Description of Artificial Sequence: Synthetic peptide
QHYGGSPRLT

SEQ ID NO: 473 - protein, 9 aa, Artificial Sequence
  Description of Artificial Sequence: Synthetic peptide
QQHYSTPWT

SEQ ID NO: 474 - protein, 9 aa, Artificial Sequence
  Description of Artificial Sequence: Synthetic peptide
LQSRIFPRT

SEQ ID NO: 475 - protein, 9 aa, Artificial Sequence
  Description of Artificial Sequence: Synthetic peptide
LQSRTIPRT

SEQ ID NO: 476 - protein, 7 aa, Artificial Sequence
  Description of Artificial Sequence: Synthetic peptide
SQSISSY

SEQ ID NO: 477 - protein, 8 aa, Artificial Sequence
  Description of Artificial Sequence: Synthetic peptide
SQSISSSF

SEQ ID NO: 478 - protein, 12 aa, Artificial Sequence
  Description of Artificial Sequence: Synthetic peptide
SQSLLHSNGYNY

SEQ ID NO: 479 - protein, 12 aa, Artificial Sequence
  Description of Artificial Sequence: Synthetic peptide
SQSLLRNDGKTP

SEQ ID NO: 480 - protein, 12 aa, Artificial Sequence
  Description of Artificial Sequence: Synthetic peptide
SQSLLYSNGYNY

SEQ ID NO: 481 - protein, 7 aa, Artificial Sequence
  Description of Artificial Sequence: Synthetic peptide
SQSVSSN

SEQ ID NO: 482 - protein, 7 aa, Artificial Sequence
  Description of Artificial Sequence: Synthetic peptide
SQSVSSK

SEQ ID NO: 483 - protein, 8 aa, Artificial Sequence
  Description of Artificial Sequence: Synthetic peptide
SQSVGSTN

SEQ ID NO: 484 - protein, 12 aa, Artificial Sequence
  Description of Artificial Sequence: Synthetic peptide
SESLVHNSGKTY

SEQ ID NO: 485 - protein, 7 aa, Artificial Sequence
  Description of Artificial Sequence: Synthetic peptide
SEDINKF

SEQ ID NO: 486 - protein, 7 aa, Artificial Sequence
  Description of Artificial Sequence: Synthetic peptide
SQSVGSN

SEQ ID NO: 487 - protein, 8 aa, Artificial Sequence
  Description of Artificial Sequence: Synthetic peptide
SQSIGSSS

SEQ ID NO: 488 - protein, 7 aa, Artificial Sequence
  Description of Artificial Sequence: Synthetic peptide
SQDIDDA

SEQ ID NO: 489 - protein, 7 aa, Artificial Sequence
  Description of Artificial Sequence: Synthetic peptide
SQDIYNN

SEQ ID NO: 490 - protein, 7 aa, Artificial Sequence
  Description of Artificial Sequence: Synthetic peptide
NNIGTKS

SEQ ID NO: 491 - protein, 7 aa, Artificial Sequence
  Description of Artificial Sequence: Synthetic peptide
DGLSKKY

SEQ ID NO: 492 - protein, 7 aa, Artificial Sequence
  Description of Artificial Sequence: Synthetic peptide
SQGIRNW

SEQ ID NO: 493 - protein, 7 aa, Artificial Sequence
  Description of Artificial Sequence: Synthetic peptide
NNIGSKS

SEQ ID NO: 494 - protein, 7 aa, Artificial Sequence
  Description of Artificial Sequence: Synthetic peptide
DSLGNYY

SEQ ID NO: 495 - protein, 8 aa, Artificial Sequence
  Description of Artificial Sequence: Synthetic peptide
SQSVSSAY

SEQ ID NO: 496 - protein, 7 aa, Artificial Sequence
  Description of Artificial Sequence: Synthetic peptide
SQSVSNS

SEQ ID NO: 497 - protein, 8 aa, Artificial Sequence
  Description of Artificial Sequence: Synthetic peptide
SQSVSSSF

SEQ ID NO: 498 - protein, 8 aa, Artificial Sequence
  Description of Artificial Sequence: Synthetic peptide
SQSVSTTF

SEQ ID NO: 499 - protein, 8 aa, Artificial Sequence
  Description of Artificial Sequence: Synthetic peptide
TQSIGSSF

SEQ ID NO: 500 - protein, 8 aa, Artificial Sequence
  Description of Artificial Sequence: Synthetic peptide
SQSVSSSY

SEQ ID NO: 501 - protein, 8 aa, Artificial Sequence
  Description of Artificial Sequence: Synthetic peptide
SQRVASNY

SEQ ID NO: 502 - protein, 8 aa, Artificial Sequence
  Description of Artificial Sequence: Synthetic peptide
SQSLSSNF

SEQ ID NO: 503 - protein, 8 aa, Artificial Sequence
  Description of Artificial Sequence: Synthetic peptide
SQSVASSF

SEQ ID NO: 504 - protein, 7 aa, Artificial Sequence
  Description of Artificial Sequence: Synthetic peptide
SQDVNTA

SEQ ID NO: 505 - protein, 11 aa, Artificial Sequence
  Description of Artificial Sequence: Synthetic peptide
SESVSVIGAHL

SEQ ID NO: 506 - protein, 11 aa, Artificial Sequence
  Description of Artificial Sequence: Synthetic peptide
SESVTILGSHL

SEQ ID NO: 507 - protein, 3 aa, Artificial Sequence
  Description of Artificial Sequence: Synthetic peptide
AAS

SEQ ID NO: 508 - protein, 3 aa, Artificial Sequence
  Description of Artificial Sequence: Synthetic peptide
GAS

SEQ ID NO: 509 - protein, 3 aa, Artificial Sequence
  Description of Artificial Sequence: Synthetic peptide
LGS

SEQ ID NO: 510 - protein, 3 aa, Artificial Sequence
  Description of Artificial Sequence: Synthetic peptide
EVS

SEQ ID NO: 511 - protein, 3 aa, Artificial Sequence
  Description of Artificial Sequence: Synthetic peptide
SAT

SEQ ID NO: 512 - protein, 3 aa, Artificial Sequence
  Description of Artificial Sequence: Synthetic peptide
AAN

SEQ ID NO: 513 - protein, 3 aa, Artificial Sequence
  Description of Artificial Sequence: Synthetic peptide
DDS

SEQ ID NO: 514 - protein, 3 aa, Artificial Sequence
  Description of Artificial Sequence: Synthetic peptide
RDK

SEQ ID NO: 515 - protein, 3 aa, Artificial Sequence
  Description of Artificial Sequence: Synthetic peptide
GKN

SEQ ID NO: 516 - protein, 3 aa, Artificial Sequence
  Description of Artificial Sequence: Synthetic peptide
GSS

SEQ ID NO: 517 - protein, 3 aa, Artificial Sequence
  Description of Artificial Sequence: Synthetic peptide
GTS

SEQ ID NO: 518 - protein, 3 aa, Artificial Sequence
  Description of Artificial Sequence: Synthetic peptide
SAS

SEQ ID NO: 519 - protein, 3 aa, Artificial Sequence
  Description of Artificial Sequence: Synthetic peptide
LAS

SEQ ID NO: 520 - protein, 6 aa, Artificial Sequence
  Description of Artificial Sequence: Synthetic peptide
SYSTPY

SEQ ID NO: 521 - protein, 7 aa, Artificial Sequence
  Description of Artificial Sequence: Synthetic peptide
YHSSPSW

SEQ ID NO: 522 - protein, 6 aa, Artificial Sequence
  Description of Artificial Sequence: Synthetic peptide
ALQTPY

SEQ ID NO: 523 - protein, 5 aa, Artificial Sequence
  Description of Artificial Sequence: Synthetic peptide
NIQFP

SEQ ID NO: 524 - protein, 5 aa, Artificial Sequence
  Description of Artificial Sequence: Synthetic peptide
SYKRA

SEQ ID NO: 525 - protein, 6 aa, Artificial Sequence
  Description of Artificial Sequence: Synthetic peptide
GRQFPY

SEQ ID NO: 526 - protein, 5 aa, Artificial Sequence
  Description of Artificial Sequence: Synthetic peptide
YGSSL

SEQ ID NO: 527 - protein, 6 aa, Artificial Sequence
  Description of Artificial Sequence: Synthetic peptide
YGSSSW

SEQ ID NO: 528 - protein, 7 aa, Artificial Sequence
  Description of Artificial Sequence: Synthetic peptide
YGSSPPW

SEQ ID NO: 529 - protein, 4 aa, Artificial Sequence
  Description of Artificial Sequence: Synthetic peptide
SYTL

SEQ ID NO: 530 - protein, 6 aa, Artificial Sequence
  Description of Artificial Sequence: Synthetic peptide
GTHWPG

SEQ ID NO: 531 - protein, 6 aa, Artificial Sequence
  Description of Artificial Sequence: Synthetic peptide
YESLPL

SEQ ID NO: 532 - protein, 7 aa, Artificial Sequence
  Description of Artificial Sequence: Synthetic peptide
YNDWLPV

SEQ ID NO: 533 - protein, 7 aa, Artificial Sequence
  Description of Artificial Sequence: Synthetic peptide
YAGSPPF

SEQ ID NO: 534 - protein, 6 aa, Artificial Sequence
  Description of Artificial Sequence: Synthetic peptide
HDNFPL

SEQ ID NO: 535 - protein, 6 aa, Artificial Sequence
  Description of Artificial Sequence: Synthetic peptide
YYRFPY

SEQ ID NO: 536 - protein, 8 aa, Artificial Sequence
  Description of Artificial Sequence: Synthetic peptide
WDSDSEHV

SEQ ID NO: 537 - protein, 6 aa, Artificial Sequence
  Description of Artificial Sequence: Synthetic peptide
WDDTTV

SEQ ID NO: 538 - protein, 6 aa, Artificial Sequence
  Description of Artificial Sequence: Synthetic peptide
YNSAPF

SEQ ID NO: 539 - protein, 9 aa, Artificial Sequence
  Description of Artificial Sequence: Synthetic peptide
RDSSGDHLR

SEQ ID NO: 540 - protein, 8 aa, Artificial Sequence
  Description of Artificial Sequence: Synthetic peptide
RDSSGHHL

SEQ ID NO: 541 - protein, 11 aa, Artificial Sequence
  Description of Artificial Sequence: Synthetic peptide
YGSSFNGSSLF

SEQ ID NO: 542 - protein, 7 aa, Artificial Sequence
  Description of Artificial Sequence: Synthetic peptide
FGTSSGL

SEQ ID NO: 543 - protein, 7 aa, Artificial Sequence
  Description of Artificial Sequence: Synthetic peptide
YESSPSW

SEQ ID NO: 544 - protein, 7 aa, Artificial Sequence
  Description of Artificial Sequence: Synthetic peptide
YGSPPRF

SEQ ID NO: 545 - protein, 7 aa, Artificial Sequence
  Description of Artificial Sequence: Synthetic peptide
YGSSPSW

SEQ ID NO: 546 - protein, 7 aa, Artificial Sequence
  Description of Artificial Sequence: Synthetic peptide
YDSSPSW

SEQ ID NO: 547 - protein, 7 aa, Artificial Sequence
  Description of Artificial Sequence: Synthetic peptide
YGTSPMY

SEQ ID NO: 548 - protein, 6 aa, Artificial Sequence
  Description of Artificial Sequence: Synthetic peptide
ALQTPL

SEQ ID NO: 549 - protein, 8 aa, Artificial Sequence
  Description of Artificial Sequence: Synthetic peptide
YGNSPPKF

SEQ ID NO: 550 - protein, 7 aa, Artificial Sequence
  Description of Artificial Sequence: Synthetic peptide
YGGSPRL

SEQ ID NO: 551 - protein, 6 aa, Artificial Sequence
  Description of Artificial Sequence: Synthetic peptide
HYSTPW

SEQ ID NO: 552 - protein, 6 aa, Artificial Sequence
  Description of Artificial Sequence: Synthetic peptide
SRIFPR

SEQ ID NO: 553 - protein, 6 aa, Artificial Sequence
  Description of Artificial Sequence: Synthetic peptide
SRTIPR

SEQ ID NO: 554 - protein, 5 aa, Artificial Sequence
  Description of Artificial Sequence: Synthetic peptide
NHGMS

SEQ ID NO: 555 - protein, 5 aa, Artificial Sequence
  Description of Artificial Sequence: Synthetic peptide
NYAMS

SEQ ID NO: 556 - protein, 5 aa, Artificial Sequence
  Description of Artificial Sequence: Synthetic peptide
DYAMH

SEQ ID NO: 557 - protein, 5 aa, Artificial Sequence
  Description of Artificial Sequence: Synthetic peptide
NFGIN

SEQ ID NO: 558 - protein, 5 aa, Artificial Sequence
  Description of Artificial Sequence: Synthetic peptide
SDAMT

SEQ ID NO: 559 - protein, 5 aa, Artificial Sequence
  Description of Artificial Sequence: Synthetic peptide
NYGIT

SEQ ID NO: 560 - protein, 5 aa, Artificial Sequence
  Description of Artificial Sequence: Synthetic peptide
DYYMS

SEQ ID NO: 561 - protein, 7 aa, Artificial Sequence
  Description of Artificial Sequence: Synthetic peptide
SSYYYWG

SEQ ID NO: 562 - protein, 7 aa, Artificial Sequence
  Description of Artificial Sequence: Synthetic peptide
TSGMCVS

SEQ ID NO: 563 - protein, 5 aa, Artificial Sequence
  Description of Artificial Sequence: Synthetic peptide
SYSMN

SEQ ID NO: 564 - protein, 5 aa, Artificial Sequence
  Description of Artificial Sequence: Synthetic peptide
SHYIH

SEQ ID NO: 565 - protein, 7 aa, Artificial Sequence
  Description of Artificial Sequence: Synthetic peptide
SGGYYWS

SEQ ID NO: 566 - protein, 5 aa, Artificial Sequence
  Description of Artificial Sequence: Synthetic peptide
SYAIS

SEQ ID NO: 567 - protein, 7 aa, Artificial Sequence
  Description of Artificial Sequence: Synthetic peptide
SNSAAWN

SEQ ID NO: 568 - protein, 5 aa, Artificial Sequence
  Description of Artificial Sequence: Synthetic peptide
SYAMS

SEQ ID NO: 569 - protein, 5 aa, Artificial Sequence
  Description of Artificial Sequence: Synthetic peptide
RYPMS

SEQ ID NO: 570 - protein, 5 aa, Artificial Sequence
  Description of Artificial Sequence: Synthetic peptide
NFGMN

SEQ ID NO: 571 - protein, 5 aa, Artificial Sequence
  Description of Artificial Sequence: Synthetic peptide
DYSIN

SEQ ID NO: 572 - protein, 5 aa, Artificial Sequence
  Description of Artificial Sequence: Synthetic peptide
HYSMN

SEQ ID NO: 573 - protein, 16 aa, Artificial Sequence
  Description of Artificial Sequence: Synthetic peptide
GIVYSGSTYYAASVKG

SEQ ID NO: 574 - protein, 17 aa, Artificial Sequence
  Description of Artificial Sequence: Synthetic peptide
GISRSGENTYYADSVKG

SEQ ID NO: 575 - protein, 17 aa, Artificial Sequence
  Description of Artificial Sequence: Synthetic peptide
GISWNSGSIGYADSVKG

SEQ ID NO: 576 - protein, 17 aa, Artificial Sequence
  Description of Artificial Sequence: Synthetic peptide
WINPKNNNTNYAQKFQG

SEQ ID NO: 577 - protein, 17 aa, Artificial Sequence
  Description of Artificial Sequence: Synthetic peptide
VISGSGGTTYYADSVKG

SEQ ID NO: 578 - protein, 17 aa, Artificial Sequence
  Description of Artificial Sequence: Synthetic peptide
WISAYNGNTNYAQKFQG

SEQ ID NO: 579 - protein, 17 aa, Artificial Sequence
  Description of Artificial Sequence: Synthetic peptide
YISSSGSTIYYADSVKG

SEQ ID NO: 580 - protein, 17 aa, Artificial Sequence
  Description of Artificial Sequence: Synthetic peptide
YISSSGNTIYYADSVKG

SEQ ID NO: 581 - protein, 16 aa, Artificial Sequence
  Description of Artificial Sequence: Synthetic peptide
SIYYSGSAYYNPSLKS

SEQ ID NO: 582 - protein, 16 aa, Artificial Sequence
  Description of Artificial Sequence: Synthetic peptide
RIDWDEDKFYSTSLKT

SEQ ID NO: 583 - protein, 17 aa, Artificial Sequence
  Description of Artificial Sequence: Synthetic peptide
SISSSSSYIYYADSVKG

SEQ ID NO: 584 - protein, 17 aa, Artificial Sequence
  Description of Artificial Sequence: Synthetic peptide
MINPSGGVTAYSQTLQG

SEQ ID NO: 585 - protein, 16 aa, Artificial Sequence
  Description of Artificial Sequence: Synthetic peptide
YIYYSGSTYYNPSLKS

SEQ ID NO: 586 - protein, 17 aa, Artificial Sequence
  Description of Artificial Sequence: Synthetic peptide
GIIPIFGTANYAQKFQG

SEQ ID NO: 587 - protein, 18 aa, Artificial Sequence
  Description of Artificial Sequence: Synthetic peptide
RTYYRSKWYSFYAISLKS

SEQ ID NO: 588 - protein, 17 aa, Artificial Sequence
  Description of Artificial Sequence: Synthetic peptide
AISGSGGSTYYADSVKG

SEQ ID NO: 589 - protein, 17 aa, Artificial Sequence
  Description of Artificial Sequence: Synthetic peptide
GISDSGVSTYYADSAKG

SEQ ID NO: 590 - protein, 17 aa, Artificial Sequence
  Description of Artificial Sequence: Synthetic peptide
SINWKGNSLAYGDSVKG

SEQ ID NO: 591 - protein, 17 aa, Artificial Sequence
  Description of Artificial Sequence: Synthetic peptide
WINTYTGESYFADDFKG

SEQ ID NO: 592 - protein, 17 aa, Artificial Sequence
  Description of Artificial Sequence: Synthetic peptide
WINTETREPAYAYDFRG

SEQ ID NO: 593 - protein, 17 aa, Artificial Sequence
  Description of Artificial Sequence: Synthetic peptide
RINTESGVPIYADDFKG

SEQ ID NO: 594 - protein, 17 aa, Artificial Sequence
  Description of Artificial Sequence: Synthetic peptide
RINTETGEPLYADDFKG

SEQ ID NO: 595 - protein, 7 aa, Artificial Sequence
  Description of Artificial Sequence: Synthetic peptide
HGGESDV

SEQ ID NO: 596 - protein, 11 aa, Artificial Sequence
  Description of Artificial Sequence: Synthetic peptide
SPAHYYGGMDV

SEQ ID NO: 597 - protein, 6 aa, Artificial Sequence
  Description of Artificial Sequence: Synthetic peptide
HSFLAY

SEQ ID NO: 598 - protein, 11 aa, Artificial Sequence
  Description of Artificial Sequence: Synthetic peptide
GPYYYQSYMDV

SEQ ID NO: 599 - protein, 14 aa, Artificial Sequence
  Description of Artificial Sequence: Synthetic peptide
LDSSGYYYARGPRY

SEQ ID NO: 600 - protein, 9 aa, Artificial Sequence
  Description of Artificial Sequence: Synthetic peptide
GPYYYYMDV

SEQ ID NO: 601 - protein, 8 aa, Artificial Sequence
  Description of Artificial Sequence: Synthetic peptide
ESGDGMDV

SEQ ID NO: 602 - protein, 8 aa, Artificial Sequence
  Description of Artificial Sequence: Synthetic peptide
STMVREDY

SEQ ID NO: 603 - protein, 11 aa, Artificial Sequence
  Description of Artificial Sequence: Synthetic peptide
HWQEWPDAFDI

SEQ ID NO: 604 - protein, 13 aa, Artificial Sequence
  Description of Artificial Sequence: Synthetic peptide
SGAGGTSATAFDI

SEQ ID NO: 605 - protein, 10 aa, Artificial Sequence
  Description of Artificial Sequence: Synthetic peptide
TIAAVYAFDI

SEQ ID NO: 606 - protein, 8 aa, Artificial Sequence
  Description of Artificial Sequence: Synthetic peptide
DLRGAFDI

SEQ ID NO: 607 - protein, 11 aa, Artificial Sequence
  Description of Artificial Sequence: Synthetic peptide
EGSGSGWYFDF

SEQ ID NO: 608 - protein, 13 aa, Artificial Sequence
  Description of Artificial Sequence: Synthetic peptide
AGIAARLRGAFDI

SEQ ID NO: 609 - protein, 20 aa, Artificial Sequence
  Description of Artificial Sequence: Synthetic peptide
RGGYQLLRWDVGLLRSAFDI

SEQ ID NO: 610 - protein, 13 aa, Artificial Sequence
  Description of Artificial Sequence: Synthetic peptide
SSPEGLFLYWFDP

SEQ ID NO: 611 - protein, 9 aa, Artificial Sequence
  Description of Artificial Sequence: Synthetic peptide
VEGSGSLDY

SEQ ID NO: 612 - protein, 9 aa, Artificial Sequence
  Description of Artificial Sequence: Synthetic peptide
RAGSEASDI

SEQ ID NO: 613 - protein, 15 aa, Artificial Sequence
  Description of Artificial Sequence: Synthetic peptide
ATYKRELRYYYGMDV

SEQ ID NO: 614 - protein, 8 aa, Artificial Sequence
  Description of Artificial Sequence: Synthetic peptide
VGKAVPDV

SEQ ID NO: 615 - protein, 13 aa, Artificial Sequence
  Description of Artificial Sequence: Synthetic peptide
HQGVAYYNYAMDV

SEQ ID NO: 616 - protein, 8 aa, Artificial Sequence
  Description of Artificial Sequence: Synthetic peptide
VVRDGMDV

SEQ ID NO: 617 - protein, 9 aa, Artificial Sequence
  Description of Artificial Sequence: Synthetic peptide
IPQTGTFDY

SEQ ID NO: 618 - protein, 15 aa, Artificial Sequence
  Description of Artificial Sequence: Synthetic peptide
ANYKRELRYYYGMDV

SEQ ID NO: 619 - protein, 11 aa, Artificial Sequence
  Description of Artificial Sequence: Synthetic peptide
ALVGATGAFDI

SEQ ID NO: 620 - protein, 8 aa, Artificial Sequence
  Description of Artificial Sequence: Synthetic peptide
WFGEGFDP

SEQ ID NO: 621 - protein, 17 aa, Artificial Sequence
  Description of Artificial Sequence: Synthetic peptide
VGYDSSGYYRDYYGMDV

SEQ ID NO: 622 - protein, 13 aa, Artificial Sequence
  Description of Artificial Sequence: Synthetic peptide
MGWSSGYLGAFDI

SEQ ID NO: 623 - protein, 13 aa, Artificial Sequence
  Description of Artificial Sequence: Synthetic peptide
GEIYYGYDGGFAY

SEQ ID NO: 624 - protein, 8 aa, Artificial Sequence
  Description of Artificial Sequence: Synthetic peptide
DYSYAMDY

SEQ ID NO: 625 - protein, 8 aa, Artificial Sequence
  Description of Artificial Sequence: Synthetic peptide
DYLYSLDF

SEQ ID NO: 626 - protein, 8 aa, Artificial Sequence
  Description of Artificial Sequence: Synthetic peptide
DYLYSCDY

SEQ ID NO: 627 - protein, 7 aa, Artificial Sequence
  Description of Artificial Sequence: Synthetic peptide
GFALSNH

SEQ ID NO: 628 - protein, 7 aa, Artificial Sequence
  Description of Artificial Sequence: Synthetic peptide
GFTFSNY

SEQ ID NO: 629 - protein, 7 aa, Artificial Sequence
  Description of Artificial Sequence: Synthetic peptide
GFTFDDY

SEQ ID NO: 630 - protein, 7 aa, Artificial Sequence
  Description of Artificial Sequence: Synthetic peptide
GYIFDNF

SEQ ID NO: 631 - protein, 7 aa, Artificial Sequence
  Description of Artificial Sequence: Synthetic peptide
GFTFSSD

SEQ ID NO: 632 - protein, 7 aa, Artificial Sequence
  Description of Artificial Sequence: Synthetic peptide
GYTFSNY

SEQ ID NO: 633 - protein, 7 aa, Artificial Sequence
  Description of Artificial Sequence: Synthetic peptide
GFTFSDY

SEQ ID NO: 634 - protein, 9 aa, Artificial Sequence
  Description of Artificial Sequence: Synthetic peptide
GGSISSSYY

SEQ ID NO: 635 - protein, 9 aa, Artificial Sequence
  Description of Artificial Sequence: Synthetic peptide
GFSLRTSGM

SEQ ID NO: 636 - protein, 7 aa, Artificial Sequence
  Description of Artificial Sequence: Synthetic peptide
GFTFSSY

SEQ ID NO: 637 - protein, 7 aa, Artificial Sequence
  Description of Artificial Sequence: Synthetic peptide
GYTVTSH

SEQ ID NO: 638 - protein, 9 aa, Artificial Sequence
  Description of Artificial Sequence: Synthetic peptide
GGSISSGGY

SEQ ID NO: 639 - protein, 7 aa, Artificial Sequence
  Description of Artificial Sequence: Synthetic peptide
GGTFSSY

SEQ ID NO: 640 - protein, 9 aa, Artificial Sequence
  Description of Artificial Sequence: Synthetic peptide
GDSVSSNSA

SEQ ID NO: 641 - protein, 7 aa, Artificial Sequence
  Description of Artificial Sequence: Synthetic peptide
GITFSRY

SEQ ID NO: 642 - protein, 7 aa, Artificial Sequence
  Description of Artificial Sequence: Synthetic peptide
GFSFSSY

SEQ ID NO: 643 - protein, 7 aa, Artificial Sequence
  Description of Artificial Sequence: Synthetic peptide
GYTFTNF

SEQ ID NO: 644 - protein, 7 aa, Artificial Sequence
  Description of Artificial Sequence: Synthetic peptide
GYTFTDY

SEQ ID NO: 645 - protein, 7 aa, Artificial Sequence
  Description of Artificial Sequence: Synthetic peptide
GYTFRHY

SEQ ID NO: 646 - protein, 7 aa, Artificial Sequence
  Description of Artificial Sequence: Synthetic peptide
GYTFTHY

SEQ ID NO: 647 - protein, 5 aa, Artificial Sequence
  Description of Artificial Sequence: Synthetic peptide
VYSGS

SEQ ID NO: 648 - protein, 6 aa, Artificial Sequence
  Description of Artificial Sequence: Synthetic peptide
SRSGEN

SEQ ID NO: 649 - protein, 6 aa, Artificial Sequence
  Description of Artificial Sequence: Synthetic peptide
SWNSGS

SEQ ID NO: 650 - protein, 6 aa, Artificial Sequence
  Description of Artificial Sequence: Synthetic peptide
NPKNNN

SEQ ID NO: 651 - protein, 6 aa, Artificial Sequence
  Description of Artificial Sequence: Synthetic peptide
SGSGGT

SEQ ID NO: 652 - protein, 6 aa, Artificial Sequence
  Description of Artificial Sequence: Synthetic peptide
SAYNGN

SEQ ID NO: 653 - protein, 6 aa, Artificial Sequence
  Description of Artificial Sequence: Synthetic peptide
SSSGST

SEQ ID NO: 654 - protein, 6 aa, Artificial Sequence
  Description of Artificial Sequence: Synthetic peptide
SSSGNT

SEQ ID NO: 655 - protein, 5 aa, Artificial Sequence
  Description of Artificial Sequence: Synthetic peptide
YYSGS

SEQ ID NO: 656 - protein, 5 aa, Artificial Sequence
  Description of Artificial Sequence: Synthetic peptide
DWDED

SEQ ID NO: 657 - protein, 6 aa, Artificial Sequence
  Description of Artificial Sequence: Synthetic peptide
SSSSSY

SEQ ID NO: 658 - protein, 6 aa, Artificial Sequence
  Description of Artificial Sequence: Synthetic peptide
NPSGGV

SEQ ID NO: 659 - protein, 6 aa, Artificial Sequence
  Description of Artificial Sequence: Synthetic peptide
IPIFGT

SEQ ID NO: 660 - protein, 7 aa, Artificial Sequence
  Description of Artificial Sequence: Synthetic peptide
YYRSKWY

SEQ ID NO: 661 - protein, 6 aa, Artificial Sequence
  Description of Artificial Sequence: Synthetic peptide
SGSGGS

SEQ ID NO: 662 - protein, 6 aa, Artificial Sequence
  Description of Artificial Sequence: Synthetic peptide
SDSGVS

SEQ ID NO: 663 - protein, 6 aa, Artificial Sequence
  Description of Artificial Sequence: Synthetic peptide
NWKGNS

SEQ ID NO: 664 - protein, 6 aa, Artificial Sequence
  Description of Artificial Sequence: Synthetic peptide
NTYTGE

SEQ ID NO: 665 - protein, 6 aa, Artificial Sequence
  Description of Artificial Sequence: Synthetic peptide
NTETRE

SEQ ID NO: 666 - protein, 6 aa, Artificial Sequence
  Description of Artificial Sequence: Synthetic peptide
NTESGV

SEQ ID NO: 667 - protein, 6 aa, Artificial Sequence
  Description of Artificial Sequence: Synthetic peptide
NTETGE

SEQ ID NO: 668 - protein, 10 aa, Artificial Sequence
  Description of Artificial Sequence: Synthetic peptide
GFALSNHGMS

SEQ ID NO: 669 - protein, 10 aa, Artificial Sequence
  Description of Artificial Sequence: Synthetic peptide
GFTFSNYAMS

SEQ ID NO: 670 - protein, 10 aa, Artificial Sequence
  Description of Artificial Sequence: Synthetic peptide
GFTFDDYAMH

SEQ ID NO: 671 - protein, 10 aa, Artificial Sequence
  Description of Artificial Sequence: Synthetic peptide
GYIFDNFGIN

SEQ ID NO: 672 - protein, 10 aa, Artificial Sequence
  Description of Artificial Sequence: Synthetic peptide
GFTFSSDAMT

SEQ ID NO: 673 - protein, 10 aa, Artificial Sequence
  Description of Artificial Sequence: Synthetic peptide
GYTFSNYGIT

SEQ ID NO: 674 - protein, 10 aa, Artificial Sequence
  Description of Artificial Sequence: Synthetic peptide
GFTFSDYYMS

SEQ ID NO: 675 - protein, 12 aa, Artificial Sequence
  Description of Artificial Sequence: Synthetic peptide
GGSISSSYYYWG

SEQ ID NO: 676 - protein, 12 aa, Artificial Sequence
  Description of Artificial Sequence: Synthetic peptide
GFSLRTSGMCVS

SEQ ID NO: 677 - protein, 10 aa, Artificial Sequence
  Description of Artificial Sequence: Synthetic peptide
GFTFSSYSMN

SEQ ID NO: 678 - protein, 10 aa, Artificial Sequence
  Description of Artificial Sequence: Synthetic peptide
GYTVTSHYIH

SEQ ID NO: 679 - protein, 12 aa, Artificial Sequence
  Description of Artificial Sequence: Synthetic peptide
GGSISSGGYYWS

SEQ ID NO: 680 - protein, 10 aa, Artificial Sequence
  Description of Artificial Sequence: Synthetic peptide
GGTFSSYAIS

SEQ ID NO: 681 - protein, 12 aa, Artificial Sequence
  Description of Artificial Sequence: Synthetic peptide
GDSVSSNSAAWN

SEQ ID NO: 682 - protein, 10 aa, Artificial Sequence
  Description of Artificial Sequence: Synthetic peptide
GFTFSSYAMS

SEQ ID NO: 683 - protein, 10 aa, Artificial Sequence
  Description of Artificial Sequence: Synthetic peptide
GITFSRYPMS

SEQ ID NO: 684 - protein, 10 aa, Artificial Sequence
  Description of Artificial Sequence: Synthetic peptide
GFSFSSYAMS

SEQ ID NO: 685 - protein, 10 aa, Artificial Sequence
  Description of Artificial Sequence: Synthetic peptide
GYTFTNFGMN

SEQ ID NO: 686 - protein, 10 aa, Artificial Sequence
  Description of Artificial Sequence: Synthetic peptide
GYTFTDYSIN

SEQ ID NO: 687 - protein, 10 aa, Artificial Sequence
  Description of Artificial Sequence: Synthetic peptide
GYTFRHYSMN

SEQ ID NO: 688 - protein, 10 aa, Artificial Sequence
  Description of Artificial Sequence: Synthetic peptide
GYTFTHYSMN

SEQ ID NO: 689 - protein, 5 aa, Artificial Sequence
  Description of Artificial Sequence: Synthetic peptide
DYGVS

SEQ ID NO: 690 - protein, 16 aa, Artificial Sequence
  Description of Artificial Sequence: Synthetic peptide
VIWGSETTYYNSALKS

SEQ ID NO: 691 - protein, 16 aa, Artificial Sequence
  Description of Artificial Sequence: Synthetic peptide
VIWGSETTYYSSSLKS

SEQ ID NO: 692 - protein, 16 aa, Artificial Sequence
  Description of Artificial Sequence: Synthetic peptide
VIWGSETTYYQSSLKS

SEQ ID NO: 693 - protein, 16 aa, Artificial Sequence
  Description of Artificial Sequence: Synthetic peptide
VIWGSETTYYNSSLKS

SEQ ID NO: 694 - protein, 12 aa, Artificial Sequence
  Description of Artificial Sequence: Synthetic peptide
HYYYGGSYAMDY

SEQ ID NO: 695 - protein, 11 aa, Artificial Sequence
  Description of Artificial Sequence: Synthetic peptide
RASQDISKYLN

SEQ ID NO: 696 - protein, 7 aa, Artificial Sequence
  Description of Artificial Sequence: Synthetic peptide
HTSRLHS

SEQ ID NO: 697 - protein, 9 aa, Artificial Sequence
  Description of Artificial Sequence: Synthetic peptide
QQGNTLPYT

SEQ ID NO: 698 - protein, 120 aa, Artificial Sequence
  Description of Artificial Sequence: Synthetic polypeptide
EVKLQESGPGLVAPSQSLSVTCTVSGVSLPDYGVSWIRQPPRKGLEWLGVIWGSETTYYNSALKSRLTIIKDNSKSQVFLKMNSLQTDDTAIYYCAKHYYYGGSYAMDYWGQGTSVTVSS

SEQ ID NO: 699 - protein, 120 aa, Artificial Sequence
  Description of Artificial Sequence: Synthetic polypeptide
QVQLQESGPGLVKPSETLSLTCTVSGVSLPDYGVSWIRQPPGKGLEWIGVIWGSETTYYSSSLKSRVTISKDNSKNQVSLKLSSVTAADTAVYYCAKHYYYGGSYAMDYWGQGTLVTVSS

SEQ ID NO: 700 - protein, 120 aa, Artificial Sequence
  Description of Artificial Sequence: Synthetic polypeptide
QVQLQESGPGLVKPSETLSLTCTVSGVSLPDYGVSWIRQPPGKGLEWIGVIWGSETTYYQSSLKSRVTISKDNSKNQVSLKLSSVTAADTAVYYCAKHYYYGGSYAMDYWGQGTLVTVSS

SEQ ID NO: 701 - protein, 120 aa, Artificial Sequence
  Description of Artificial Sequence: Synthetic polypeptide
QVQLQESGPGLVKPSETLSLTCTVSGVSLPDYGVSWIRQPPGKGLEWIGVIWGSETTYYNSSLKSRVTISKDNSKNQVSLKLSSVTAADTAVYYCAKHYYYGGSYAMDYWGQGTLVTVSS

SEQ ID NO: 702 - protein, 107 aa, Artificial Sequence
  Description of Artificial Sequence: Synthetic polypeptide
DIQMTQTTSSLSASLGDRVTISCRASQDISKYLNWYQQKPDGTVKLLIYHTSRLHSGVPSRFSGSGSGTDYSLTISNLEQEDIATYFCQQGNTLPYTFGGGTKLEIT

SEQ ID NO: 703 - protein, 107 aa, Artificial Sequence
  Description of Artificial Sequence: Synthetic polypeptide
EIVMTQSPATLSLSPGERATLSCRASQDISKYLNWYQQKPGQAPRLLIYHTSRLHSGIPARFSGSGSGTDYTLTISSLQPEDFAVYFCQQGNTLPYTFGQGTKLEIK

SEQ ID NO: 704 - protein, 242 aa, Artificial Sequence
  Description of Artificial Sequence: Synthetic polypeptide
EIVMTQSPATLSLSPGERATLSCRASQDISKYLNWYQQKPGQAPRLLIYHTSRLHSGIPARFSGSGSGTDYTLTISSLQPEDFAVYFCQQGNTLPYTFGQGTKLEIKGGGGSGGGGSGGGGSQVQLQESGPGLVKPSETLSLTCTVSGVSLPDYGVSWIRQPPGKGLEWIGVIWGSETTYYSSSLKSRVTISKDNSKNQVSLKLSSVTAADTAVYYCAKHYYYGGSYAMDYWGQGTLVTVSS

SEQ ID NO: 705 - protein, 242 aa, Artificial Sequence
  Description of Artificial Sequence: Synthetic polypeptide
EIVMTQSPATLSLSPGERATLSCRASQDISKYLNWYQQKPGQAPRLLIYHTSRLHSGIPARFSGSGSGTDYTLTISSLQPEDFAVYFCQQGNTLPYTFGQGTKLEIKGGGGSGGGGSGGGGSQVQLQESGPGLVKPSETLSLTCTVSGVSLPDYGVSWIRQPPGKGLEWIGVIWGSETTYYQSSLKSRVTISKDNSKNQVSLKLSSVTAADTAVYYCAKHYYYGGSYAMDYWGQGTLVTVSS

SEQ ID NO: 706 - protein, 242 aa, Artificial Sequence
  Description of Artificial Sequence: Synthetic polypeptide
QVQLQESGPGLVKPSETLSLTCTVSGVSLPDYGVSWIRQPPGKGLEWIGVIWGSETTYYSSSLKSRVTISKDNSKNQVSLKLSSVTAADTAVYYCAKHYYYGGSYAMDYWGQGTLVTVSSGGGGSGGGGSGGGGSEIVMTQSPATLSLSPGERATLSCRASQDISKYLNWYQQKPGQAPRLLIYHTSRLHSGIPARFSGSGSGTDYTLTISSLQPEDFAVYFCQQGNTLPYTFGQGTKLEIK

SEQ ID NO: 707 - protein, 242 aa, Artificial Sequence
  Description of Artificial Sequence: Synthetic polypeptide
QVQLQESGPGLVKPSETLSLTCTVSGVSLPDYGVSWIRQPPGKGLEWIGVIWGSETTYYQSSLKSRVTISKDNSKNQVSLKLSSVTAADTAVYYCAKHYYYGGSYAMDYWGQGTLVTVSSGGGGSGGGGSGGGGSEIVMTQSPATLSLSPGERATLSCRASQDISKYLNWYQQKPGQAPRLLIYHTSRLHSGIPARFSGSGSGTDYTLTISSLQPEDFAVYFCQQGNTLPYTFGQGTKLEIK

SEQ ID NO: 708 - protein, 247 aa, Artificial Sequence
  Description of Artificial Sequence: Synthetic polypeptide
EIVMTQSPATLSLSPGERATLSCRASQDISKYLNWYQQKPGQAPRLLIYHTSRLHSGIPARFSGSGSGTDYTLTISSLQPEDFAVYFCQQGNTLPYTFGQGTKLEIKGGGGSGGGGSGGGGSGGGGSQVQLQESGPGLVKPSETLSLTCTVSGVSLPDYGVSWIRQPPGKGLEWIGVIWGSETTYYSSSLKSRVTISKDNSKNQVSLKLSSVTAADTAVYYCAKHYYYGGSYAMDYWGQGTLVTVSS

SEQ ID NO: 709 - protein, 247 aa, Artificial Sequence
  Description of Artificial Sequence: Synthetic polypeptide
EIVMTQSPATLSLSPGERATLSCRASQDISKYLNWYQQKPGQAPRLLIYHTSRLHSGIPARFSGSGSGTDYTLTISSLQPEDFAVYFCQQGNTLPYTFGQGTKLEIKGGGGSGGGGSGGGGSGGGGSQVQLQESGPGLVKPSETLSLTCTVSGVSLPDYGVSWIRQPPGKGLEWIGVIWGSETTYYQSSLKSRVTISKDNSKNQVSLKLSSVTAADTAVYYCAKHYYYGGSYAMDYWGQGTLVTVSS

SEQ ID NO: 710 - protein, 247 aa, Artificial Sequence
  Description of Artificial Sequence: Synthetic polypeptide
QVQLQESGPGLVKPSETLSLTCTVSGVSLPDYGVSWIRQPPGKGLEWIGVIWGSETTYYSSSLKSRVTISKDNSKNQVSLKLSSVTAADTAVYYCAKHYYYGGSYAMDYWGQGTLVTVSSGGGGSGGGGSGGGGSGGGGSEIVMTQSPATLSLSPGERATLSCRASQDISKYLNWYQQKPGQAPRLLIYHTSRLHSGIPARFSGSGSGTDYTLTISSLQPEDFAVYFCQQGNTLPYTFGQGTKLEIK

SEQ ID NO: 711 - protein, 247 aa, Artificial Sequence
  Description of Artificial Sequence: Synthetic polypeptide
QVQLQESGPGLVKPSETLSLTCTVSGVSLPDYGVSWIRQPPGKGLEWIGVIWGSETTYYQSSLKSRVTISKDNSKNQVSLKLSSVTAADTAVYYCAKHYYYGGSYAMDYWGQGTLVTVSSGGGGSGGGGSGGGGSGGGGSEIVMTQSPATLSLSPGERATLSCRASQDISKYLNWYQQKPGQAPRLLIYHTSRLHSGIPARFSGSGSGTDYTLTISSLQPEDFAVYFCQQGNTLPYTFGQGTKLEIK

SEQ ID NO: 712 - protein, 247 aa, Artificial Sequence
  Description of Artificial Sequence: Synthetic polypeptide
EIVMTQSPATLSLSPGERATLSCRASQDISKYLNWYQQKPGQAPRLLIYHTSRLHSGIPARFSGSGSGTDYTLTISSLQPEDFAVYFCQQGNTLPYTFGQGTKLEIKGGGGSGGGGSGGGGSGGGGSQVQLQESGPGLVKPSETLSLTCTVSGVSLPDYGVSWIRQPPGKGLEWIGVIWGSETTYYNSSLKSRVTISKDNSKNQVSLKLSSVTAADTAVYYCAKHYYYGGSYAMDYWGQGTLVTVSS

SEQ ID NO: 713 - protein, 247 aa, Artificial Sequence
  Description of Artificial Sequence: Synthetic polypeptide
QVQLQESGPGLVKPSETLSLTCTVSGVSLPDYGVSWIRQPPGKGLEWIGVIWGSETTYYNSSLKSRVTISKDNSKNQVSLKLSSVTAADTAVYYCAKHYYYGGSYAMDYWGQGTLVTVSSGGGGSGGGGSGGGGSGGGGSEIVMTQSPATLSLSPGERATLSCRASQDISKYLNWYQQKPGQAPRLLIYHTSRLHSGIPARFSGSGSGTDYTLTISSLQPEDFAVYFCQQGNTLPYTFGQGTKLEIK

SEQ ID NO: 714 - protein, 242 aa, Artificial Sequence
  Description of Artificial Sequence: Synthetic polypeptide
EIVMTQSPATLSLSPGERATLSCRASQDISKYLNWYQQKPGQAPRLLIYHTSRLHSGIPARFSGSGSGTDYTLTISSLQPEDFAVYFCQQGNTLPYTFGQGTKLEIKGGGGSGGGGSGGGGSQVQLQESGPGLVKPSETLSLTCTVSGVSLPDYGVSWIRQPPGKGLEWIGVIWGSETTYYNSSLKSRVTISKDNSKNQVSLKLSSVTAADTAVYYCAKHYYYGGSYAMDYWGQGTLVTVSS

SEQ ID NO: 715 - protein, 242 aa, Artificial Sequence
  Description of Artificial Sequence: Synthetic polypeptide
QVQLQESGPGLVKPSETLSLTCTVSGVSLPDYGVSWIRQPPGKGLEWIGVIWGSETTYYNSSLKSRVTISKDNSKNQVSLKLSSVTAADTAVYYCAKHYYYGGSYAMDYWGQGTLVTVSSGGGGSGGGGSGGGGSEIVMTQSPATLSLSPGERATLSCRASQDISKYLNWYQQKPGQAPRLLIYHTSRLHSGIPARFSGSGSGTDYTLTISSLQPEDFAVYFCQQGNTLPYTFGQGTKLEIK

SEQ ID NO: 716 - protein, 4 aa, Artificial Sequence
  Description of Artificial Sequence: Synthetic peptide
GFLG

SEQ ID NO: 717 - protein, 4 aa, Artificial Sequence
  Description of Artificial Sequence: Synthetic peptide
ALAL

SEQ ID NO: 718 - protein, 4 aa, Artificial Sequence
  Description of Artificial Sequence: Synthetic peptide
RGDS

SEQ ID NO: 719 - protein, 7 aa, Artificial Sequence
  Description of Artificial Sequence: Synthetic peptide
GVSLPDY

SEQ ID NO: 720 - protein, 5 aa, Artificial Sequence
  Description of Artificial Sequence: Synthetic peptide
WGSET

SEQ ID NO: 721 - protein, 7 aa, Artificial Sequence
  Description of Artificial Sequence: Synthetic peptide
SQDISKY

SEQ ID NO: 722 - protein, 3 aa, Artificial Sequence
  Description of Artificial Sequence: Synthetic peptide
HTS

SEQ ID NO: 723 - protein, 6 aa, Artificial Sequence
  Description of Artificial Sequence: Synthetic peptide
GNTLPY

SEQ ID NO: 724 - protein, 6 aa, Artificial Sequence
  Description of Artificial Sequence: Synthetic peptide
QDISKY

SEQ ID NO: 725 - protein, 8 aa, Artificial Sequence
  Description of Artificial Sequence: Synthetic peptide
GFTFNTYA

SEQ ID NO: 726 - protein, 10 aa, Artificial Sequence
  Description of Artificial Sequence: Synthetic peptide
IRSKYNNYAT

SEQ ID NO: 727 - protein, 9 aa, Artificial Sequence
  Description of Artificial Sequence: Synthetic peptide
TGAVTTSNY

SEQ ID NO: 728 - protein, 10 aa, Artificial Sequence
  Description of Artificial Sequence: Synthetic peptide
GTNKRAPWTP

SEQ ID NO: 729 - protein, 227 aa, Artificial Sequence
  Description of Artificial Sequence: Synthetic polypeptide
DKTHTCPPCPAPELLGGPSVFLFPPKPKDTLMISRTPEVTCVVVAVSHEDPEVKFNWYVDGVEVHNAKTKPREEQYNSTYRVVSVLTVLHQDWLNGKEYKCKVSNKALAAPIEKTISKAKGQPREPQVYTLPPCRDELTKNQVSLWCLVKGFYPSDIAVEWESNGQPENNYKTTPPVLDSDGSFFLYSKLTVDKSRWQQGNVFSCSVMHEALHNHYTQKSLSLSPGK

SEQ ID NO: 730 - protein, 474 aa, Artificial Sequence
  Description of Artificial Sequence: Synthetic polypeptide
QVQLQESGPGLVKPSETLSLTCTVSGVSLPDYGVSWIRQPPGKGLEWIGVIWGSETTYYQSSLKSRVTISKDNSKNQVSLKLSSVTAADTAVYYCAKHYYYGGSYAMDYWGQGTLVTVSSGGGGSGGGGSGGGGSEIVMTQSPATLSLSPGERATLSCRASQDISKYLNWYQQKPGQAPRLLIYHTSRLHSGIPARFSGSGSGTDYTLTISSLQPEDFAVYFCQQGNTLPYTFGQGTKLEIKGGGGSDKTHTCPPCPAPELLGGPSVFLFPPKPKDTLMISRTPEVTCVVVAVSHEDPEVKFNWYVDGVEVHNAKTKPREEQYNSTYRVVSVLTVLHQDWLNGKEYKCKVSNKALAAPIEKTISKAKGQPREPQVYTLPPCRDELTKNQVSLWCLVKGFYPSDIAVEWESNGQPENNYKTTPPVLDSDGSFFLYSKLTVDKSRWQQGNVFSCSVMHEALHNHYTQKSLSLSPGK

SEQ ID NO: 731 - protein, 227 aa, Artificial Sequence
  Description of Artificial Sequence: Synthetic polypeptide
DKTHTCPPCPAPELLGGPSVFLFPPKPKDTLMISRTPEVTCVVVAVSHEDPEVKFNWYVDGVEVHNAKTKPREEQYNSTYRVVSVLTVLHQDWLNGKEYKCKVSNKALAAPIEKTISKAKGQPREPQVCTLPPSRDELTKNQVSLSCAVKGFYPSDIAVEWESNGQPENNYKTTPPVLDSDGSFFLVSKLTVDKSRWQQGNVFSCSVMHEALHNHYTQKSLSLSPGK

SEQ ID NO: 732 - protein, 486 aa, Artificial Sequence
  Description of Artificial Sequence: Synthetic polypeptide
EVQLVESGGGLVQPGGSLKLSCAASGFTFNTYAMNWVRQASGKGLEWVGRIRSKYNNYATYYADSVKDRFTISRDDSKSTLYLQMNSLKTEDTAVYYCVRHGNFGNSYVSWFAYWGQGTLVTVSSGGGGSGGGGSGGGGSGGGGSQAVVTQEPSLTVSPGGTVTLTCRSSTGAVTTSNYANWVQQKPGQAPRGLIGGTNKRAPWTPARFSGSLLGDKAALTLSGAQPEDEAEYFCALWYSNLWVFGGGTKLTVLGGGGSDKTHTCPPCPAPELLGGPSVFLFPPKPKDTLMISRTPEVTCVVVAVSHEDPEVKFNWYVDGVEVHNAKTKPREEQYNSTYRVVSVLTVLHQDWLNGKEYKCKVSNKALAAPIEKTISKAKGQPREPQVCTLPPSRDELTKNQVSLSCAVKGFYPSDIAVEWESNGQPENNYKTTPPVLDSDGSFFLVSKLTVDKSRWQQGNVFSCSVMHEALHNHYTQKSLSLSPGK

SEQ ID NO: 733 - protein, 187 aa, Artificial Sequence; identical to SEQ ID NO: 259
  Description of Artificial Sequence: Synthetic polypeptide

SEQ ID NO: 734 - protein, 419 aa, Artificial Sequence
  Description of Artificial Sequence: Synthetic polypeptide
FSQQIYGVVYGNVTFHVPSNVPLKEVLWKKQKDKVAELENSEFRAFSSFKNRVYLDTVSGSLTIYNLTSSDEDEYEMESPNITDTMKFFLYVLESLPSPTLTCALTNGSIEVQCMIPEHYNSHRGLIMYSWDCPMEQCKRNSTSIYFKMENDLPQKIQCTLSNPLFNTTSSIILTTCIPSSGHSRHRGGGGSDKTHTCPPCPAPELLGGPSVFLFPPKPKDTLMISRTPEVTCVVVAVSHEDPEVKFNWYVDGVEVHNAKTKPREEQYNSTYRVVSVLTVLHQDWLNGKEYKCKVSNKALAAPIEKTISKAKGQPREPQVCTLPPSRDELTKNQVSLSCAVKGFYPSDIAVEWESNGQPENNYKTTPPVLDSDGSFFLVSKLTVDKSRWQQGNVFSCSVMHEALHNHYTQKSLSLSPGK

SEQ ID NO: 735 - protein, 223 aa, Artificial Sequence
  Description of Artificial Sequence: Synthetic polypeptide
QVQLQESGPGLVKPSETLSLTCTVSGVSLPDYGVSWIRQPPGKGLEWIGVIWGSETTYYQSSLKSRVTISKDNSKNQVSLKLSSVTAADTAVYYCAKHYYYGGSYAMDYWGQGTLVTVSSASTKGPSVFPLAPSSKSTSGGTAALGCLVKDYFPEPVTVSWNSGALTSGVHTFPAVLQSSGLYSLSSVVTVPSSSLGTQTYICNVNHKPSNTKVDKRVEPKSC

SEQ ID NO: 736 - protein, 214 aa, Artificial Sequence
  Description of Artificial Sequence: Synthetic polypeptide
EIVMTQSPATLSLSPGERATLSCRASQDISKYLNWYQQKPGQAPRLLIYHTSRLHSGIPARFSGSGSGTDYTLTISSLQPEDFAVYFCQQGNTLPYTFGQGTKLEIKRTVAAPSVFIFPPSDEQLKSGTASVVCLLNNFYPREAKVQWKVDNALQSGNSQESVTEQDSKDSTYSLSSTLTLSKADYEKHKVYACEVTHQGLSSPVTKSFNRGEC

SEQ ID NO: 737 - protein, 227 aa, Artificial Sequence
  Description of Artificial Sequence: Synthetic polypeptide
DKTHTCPPCPAPELLGGPSVFLFPPKPKDTLMISRTPEVTCVVVAVSHEDPEVKFNWYVDGVEVHNAKTKPREEQYGSTYRVVSVLTVLHQDWLNGKEYKCKVSNKALAAPIEKTISKAKGQPREPQVCTLPPSRDELTKNQVSLSCAVKGFYPSDIAVEWESNGQPENNYKTTPPVLDSDGSFFLVSKLTVDKSRWQQGNVFSCSVMHEALHNHYTQKSLSLSPGK

SEQ ID NO: 738 - protein, 719 aa, Artificial Sequence
  Description of Artificial Sequence: Synthetic polypeptide
QVQLQESGPGLVKPSETLSLTCTVSGVSLPDYGVSWIRQPPGKGLEWIGVIWGSETTYYQSSLKSRVTISKDNSKNQVSLKLSSVTAADTAVYYCAKHYYYGGSYAMDYWGQGTLVTVSSASTKGPSVFPLAPSSKSTSGGTAALGCLVKDYFPEPVTVSWNSGALTSGVHTFPAVLQSSGLYSLSSVVTVPSSSLGTQTYICNVNHKPSNTKVDKRVEPKSCGGGGSGGGGSEVQLVESGGGLVQPGGSLKLSCAASGFTFNTYAMNWVRQASGKGLEWVGRIRSKYNNYATYYADSVKDRFTISRDDSKSTLYLQMNSLKTEDTAVYYCVRHGNFGNSYVSWFAYWGQGTLVTVSSGGGGSGGGGSGGGGSGGGGSQAVVTQEPSLTVSPGGTVTLTCRSSTGAVTTSNYANWVQQKPGQAPRGLIGGTNKRAPWTPARFSGSLLGDKAALTLSGAQPEDEAEYFCALWYSNLWVFGGGTKLTVLGGGGSDKTHTCPPCPAPELLGGPSVFLFPPKPKDTLMISRTPEVTCVVVAVSHEDPEVKFNWYVDGVEVHNAKTKPREEQYGSTYRVVSVLTVLHQDWLNGKEYKCKVSNKALAAPIEKTISKAKGQPREPQVCTLPPSRDELTKNQVSLSCAVKGFYPSDIAVEWESNGQPENNYKTTPPVLDSDGSFFLVSKLTVDKSRWQQGNVFSCSVMHEALHNHYTQKSLSLSPGK

SEQ ID NO: 739 - protein, 4 aa, Artificial Sequence
  Description of Artificial Sequence: Synthetic peptide
GGGS

SEQ ID NO: 740 - protein, 227 aa, Artificial Sequence
  Description of Artificial Sequence: Synthetic polypeptide
DKTHTCPPCPAPELLGGPSVFLFPPKPKDTLMISRTPEVTCVVVDVSHEDPEVKFNWYVDGVEVHNAKTKPREEQYASTYRVVSVLTVLHQDWLNGKEYKCKVSNKALPAPIEKTISKAKGQPREPQVYTLPPCREEMTKNQVSLWCLVKGFYPSDIAVEWESNGQPENNYKTTPPVLDSDGSFFLYSKLTVDKSRWQQGNVFSCSVMHEALHNRYTQKSLSLSPGK

SEQ ID NO: 741 - protein, 418 aa, Artificial Sequence
  Description of Artificial Sequence: Synthetic polypeptide
FSQQIYGVVYGNVTFHVPSNVPLKEVLWKKQKDKVAELENSEFRAFSSFKNRVYLDTVSGSLTIYNLTSSDEDEYEMESPNITDTMKFFLYVLESLPSPTLTCALTNGSIEVQCMIPEHYNSHRGLIMYSWDCPMEQCKRNSTSIYFKMENDLPQKIQCTLSNPLFNTTSSIILTTCIPSSGHSRHRGGGSDKTHTCPPCPAPELLGGPSVFLFPPKPKDTLMISRTPEVTCVVVDVSHEDPEVKFNWYVDGVEVHNAKTKPREEQYASTYRVVSVLTVLHQDWLNGKEYKCKVSNKALPAPIEKTISKAKGQPREPQVYTLPPCREEMTKNQVSLWCLVKGFYPSDIAVEWESNGQPENNYKTTPPVLDSDGSFFLYSKLTVDKSRWQQGNVFSCSVMHEALHNRYTQKSLSLSPGK

SEQ ID NO: 742 - protein, 494 aa, Artificial Sequence
  Description of Artificial Sequence: Synthetic polypeptide
EVQLVESGGGLVKPGGSLRLSCAASGFTFSPYSVFWVRQAPGKGLEWVSSINTDSTYKYYADSVKGRFTISRDNAENSIFLQMNSLRAEDTAVYYCARDRSYYAFSSGSLSDYYYGLDVWGQGTLVTVSSGGGGSGGGGSGGGGSGGGGSDIVMTQSPLSLSVTPGEPASISCRSSQSLLHTNLYNYLDWYVQKPGQSPQLLIYLASNRASGVPDRFSGSGSGTDFTLKISRVETEDVGVYYCMQALQIPRTFGQGTKLEIKGGGGSDKTHTCPPCPAPELLGGPSVFLFPPKPKDTLMISRTPEVTCVVVAVSHEDPEVKFNWYVDGVEVHNAKTKPREEQYNSTYRVVSVLTVLHQDWLNGKEYKCKVSNKALAAPIEKTISKAKGQPREPQVYTLPPCRDELTKNQVSLWCLVKGFYPSDIAVEWESNGQPENNYKTTPPVLDSDGSFFLYSKLTVDKSRWQQGNVFSCSVMHEALHNHYTQKSLSLSPGK

SEQ ID NO: 743 - protein, 719 aa, Artificial Sequence
  Description of Artificial Sequence: Synthetic polypeptide
QVQLQESGPGLVKPSETLSLTCTVSGVSLPDYGVSWIRQPPGKGLEWIGVIWGSETTYYQSSLKSRVTISKDNSKNQVSLKLSSVTAADTAVYYCAKHYYYGGSYAMDYWGQGTLVTVSSASTKGPSVFPLAPSSKSTSGGTAALGCLVKDYFPEPVTVSWNSGALTSGVHTFPAVLQSSGLYSLSSVVTVPSSSLGTQTYICNVNHKPSNTKVDKRVEPKSCGGGGSGGGGSEVQLVESGGGLVQPGGSLKLSCAASGFTFNTYAMNWVRQASGKGLEWVGRIRSKYNNYATYYADSVKDRFTISRDDSKSTLYLQMNSLKTEDTAVYYCVRHGNFGNSYVSWFAYWGQGTLVTVSSGGGGSGGGGSGGGGSGGGGSQAVVTQEPSLTVSPGGTVTLTCRSSTGAVTTSNYANWVQQKPGQAPRGLIGGTNKRAPWTPARFSGSLLGDKAALTLSGAQPEDEAEYFCALWYSNLWVFGGGTKLTVLGGGGSDKTHTCPPCPAPELLGGPSVFLFPPKPKDTLMISRTPEVTCVVVAVSHEDPEVKFNWYVDGVEVHNAKTKPREEQYASTYRVVSVLTVLHQDWLNGKEYKCKVSNKALAAPIEKTISKAKGQPREPQVCTLPPSREEMTKNQVSLSCAVKGFYPSDIAVEWESNGQPENNYKTTPPVLDSDGSFFLVSKLTVDKSRWQQGNVFSCSVMHEALHNHYTQKSLSLSPGK

SEQ ID NO: 744 - protein, 326 aa, Artificial Sequence
  Description of Artificial Sequence: Synthetic polypeptide
SQQIYGVVYGNVTFHVPSNVPLKEVLWKKQKDKVAELENSEFRAFSSFKNRVYLDTVSGSLTIYNLTSSDEDEYEMESPNITDTMKFFLYVLESGGGGSDKTHTCPPCPAPELLGGPSVFLFPPKPKDTLMISRTPEVTCVVVAVSHEDPEVKFNWYVDGVEVHNAKTKPREEQYASTYRVVSVLTVLHQDWLNGKEYKCKVSNKALAAPIEKTISKAKGQPREPQVYTLPPCREEMTKNQVSLWCLVKGFYPSDIAVEWESNGQPENNYKTTPPVLDSDGSFFLYSKLTVDKSRWQQGNVFSCSVMHEALHNRYTQKSLSLSPGK

SEQ ID NO: 745 - protein, 482 aa, Artificial Sequence
  Description of Artificial Sequence: Synthetic polypeptide
QVQLVQSGAEVQRPGASVKVSCKASGYIFTEYYMYWVRQAPGQGLELVGRIDPEDGSIDYVEKFKKKVTLTADTSSSTAYMELSSLTSDDTAVYYCARGKFNYRFAYWGQGTLVTVSSGGGGSGGGGSGGGGSGGGGSDVVMTQSPPSLLVTLGQPASISCRSSQSLLHSSGNTYLNWLLQRPGQSPQPLIYLVSKLESGVPDRFSGSGSGTDFTLKISGVEAEDVGVYYCMQFTHYPYTFGQGTKLEIKGGGGSDKTHTCPPCPAPELLGGPSVFLFPPKPKDTLMISRTPEVTCVVVAVSHEDPEVKFNWYVDGVEVHNAKTKPREEQYNSTYRVVSVLTVLHQDWLNGKEYKCKVSNKALAAPIEKTISKAKGQPREPQVCTLPPSRDELTKNQVSLSCAVKGFYPSDIAVEWESNGQPENNYKTTPPVLDSDGSFFLVSKLTVDKSRWQQGNVFSCSVMHEALHNHYTQKSLSLSPGK

SEQ ID NO: 746 - protein, 327 aa, Artificial Sequence
  Description of Artificial Sequence: Synthetic polypeptide
FSQQIYGVVYGNVTFHVPSNVPLKEVLWKKQKDKVAELENSEFRAFSSFKNRVYLDTVSGSLTIYNLTSSDEDEYEMESPNITDTMKFFLYVLESGGGGSDKTHTCPPCPAPELLGGPSVFLFPPKPKDTLMISRTPEVTCVVVDVSHEDPEVKFNWYVDGVEVHNAKTKPREEQYASTYRVVSVLTVLHQDWLNGKEYKCKVSNKALPAPIEKTISKAKGQPREPQVYTLPPCREEMTKNQVSLWCLVKGFYPSDIAVEWESNGQPENNYKTTPPVLDSDGSFFLYSKLTVDKSRWQQGNVFSCSVMHEALHNRYTQKSLSLSPGK

SEQ ID NO: 747 - protein, 450 aa, Artificial Sequence
  Description of Artificial Sequence: Synthetic polypeptide
QVQLQESGPGLVKPSETLSLTCTVSGVSLPDYGVSWIRQPPGKGLEWIGVIWGSETTYYQSSLKSRVTISKDNSKNQVSLKLSSVTAADTAVYYCAKHYYYGGSYAMDYWGQGTLVTVSSASTKGPSVFPLAPSSKSTSGGTAALGCLVKDYFPEPVTVSWNSGALTSGVHTFPAVLQSSGLYSLSSVVTVPSSSLGTQTYICNVNHKPSNTKVDKRVEPKSCDKTHTCPPCPAPELLGGPSVFLFPPKPKDTLMISRTPEVTCVVVDVSHEDPEVKFNWYVDGVEVHNAKTKPREEQYASTYRVVSVLTVLHQDWLNGKEYKCKVSNKALPAPIEKTISKAKGQPREPQVCTLPPSREEMTKNQVSLSCAVKGFYPSDIAVEWESNGQPENNYKTTPPVLDSDGSFFLVSKLTVDKSRWQQGNVFSCSVMHEALHNHYTQKSLSLSPGK

SEQ ID NO: 748 - protein, 640 aa, Artificial Sequence
  Description of Artificial Sequence: Synthetic polypeptide
SQQIYGVVYGNVTFHVPSNVPLKEVLWKKQKDKVAELENSEFRAFSSFKNRVYLDTVSGSLTIYNLTSSDEDEYEMESPNITDTMKFFLYVLESLPSPTLTCALTNGSIEVQCMIPEHYNSHRGLIMYSWDCPMEQCKRNSTSIYFKMENDLPQKIQCTLSNPLFNTTSSIILTTCIPSSGHSRHRGGGGSGGGGSQAVVTQEPSLTVSPGGTVTLTCRSSTGAVTTSNYANWVQQKPGQAPRGLIGGTNKRAPWTPARFSGSLLGDKAALTLSGAQPEDEAEYFCALWYSNLWVFGGGTKLTVLGQPKAAPSVTLFPPSSEELQANKATLVCLISDFYPGAVTVAWKADSSPVKAGVETTTPSKQSNNKYAASSYLSLTPEQWKSHRSYSCQVTHEGSTVEKTVAPTECSGSDKTHTCPPCPAPELLGGPSVFLFPPKPKDTLMISRTPEVTCVVVDVSHEDPEVKFNWYVDGVEVHNAKTKPREEQYASTYRVVSVLTVLHQDWLNGKEYKCKVSNKALPAPIEKTISKAKGQPREPQVYTLPPCREEMTKNQVSLWCLVKGFYPSDIAVEWESNGQPENNYKTTPPVLDSDGSFFLYSKLTVDKSRWQQGNVFSCSVMHEALHNRYTQKSLSLSPGK

SEQ ID NO: 749 - protein, 228 aa, Artificial Sequence
  Description of Artificial Sequence: Synthetic polypeptide
EVQLVESGGGLVQPGGSLKLSCAASGFTFNTYAMNWVRQASGKGLEWVGRIRSKYNNYATYYADSVKDRFTISRDDSKSTLYLQMNSLKTEDTAVYYCVRHGNFGNSYVSWFAYWGQGTLVTVSSASTKGPSVFPLAPSSKSTSGGTAALGCLVKDYFPEPVTVSWNSGALTSGVHTFPAVLQSSGLYSLSSVVTVPSSSLGTQTYICNVNHKPSNTKVDKRVEPKSC

SEQ ID NO: 750 - protein, 682 aa, Artificial Sequence
  Description of Artificial Sequence: Synthetic polypeptide
SQQIYGVVYGNVTFHVPSNVPLKEVLWKKQKDKVAELENSEFRAFSSFKNRVYLDTVSGSLTIYNLTSSDEDEYEMESPNITDTMKFFLYVLESLPSPTLTCALTNGSIEVQCMIPEHYNSHRGLIMYSWDCPMEQCKRNSTSIYFKMENDLPQKIQCTLSNPLFNTTSSIILTTCIPSSGHSRHRGGGGSGGGGSEVQLVESGGGLVQPGGSLKLSCAASGFTFNTYAMNWVRQASGKGLEWVGRIRSKYNNYATYYADSVKDRFTISRDDSKSTLYLQMNSLKTEDTAVYYCVRHGNFGNSYVSWFAYWGQGTLVTVSSGGGGSGGGGSGGGGSGGGGSQAVVTQEPSLTVSPGGTVTLTCRSSTGAVTTSNYANWVQQKPGQAPRGLIGGTNKRAPWTPARFSGSLLGDKAALTLSGAQPEDEAEYFCALWYSNLWVFGGGTKLTVLGGGGSDKTHTCPPCPAPELLGGPSVFLFPPKPKDTLMISRTPEVTCVVVDVSHEDPEVKFNWYVDGVEVHNAKTKPREEQYASTYRVVSVLTVLHQDWLNGKEYKCKVSNKALPAPIEKTISKAKGQPREPQVYTLPPCREEMTKNQVSLWCLVKGFYPSDIAVEWESNGQPENNYKTTPPVLDSDGSFFLYSKLTVDKSRWQQGNVFSCSVMHEALHNRYTQKSLSLSPGK

SEQ ID NO: 751 - protein, 679 aa, Artificial Sequence
  Description of Artificial Sequence: Synthetic polypeptide
EVQLVESGGGLVQPGGSLKLSCAASGFTFNTYAMNWVRQASGKGLEWVGRIRSKYNNYATYYADSVKDRFTISRDDSKSTLYLQMNSLKTEDTAVYYCVRHGNFGNSYVSWFAYWGQGTLVTVSSGGGGSGGGGSGGGGSGGGGSQAVVTQEPSLTVSPGGTVTLTCRSSTGAVTTSNYANWVQQKPGQAPRGLIGGTNKRAPWTPARFSGSLLGDKAALTLSGAQPEDEAEYFCALWYSNLWVFGGGTKLTVLGGGGSGGGGSSQQIYGVVYGNVTFHVPSNVPLKEVLWKKQKDKVAELENSEFRAFSSFKNRVYLDTVSGSLTIYNLTSSDEDEYEMESPNITDTMKFFLYVLESLPSPTLTCALTNGSIEVQCMIPEHYNSHRGLIMYSWDCPMEQCKRNSTSIYFKMENDLPQKIQCTLSNPLFNTTSSIILTTCIPSSGHSRHRGSDKTHTCPPCPAPELLGGPSVFLFPPKPKDTLMISRTPEVTCVVVDVSHEDPEVKFNWYVDGVEVHNAKTKPREEQYASTYRVVSVLTVLHQDWLNGKEYKCKVSNKALPAPIEKTISKAKGQPREPQVYTLPPCREEMTKNQVSLWCLVKGFYPSDIAVEWESNGQPENNYKTTPPVLDSDGSFFLYSKLTVDKSRWQQGNVFSCSVMHEALHNRYTQKSLSLSPGK

SEQ ID NO: 752 - protein, 692 aa, Artificial Sequence
  Description of Artificial Sequence: Synthetic polypeptide
EVQLVESGGGLVQPGGSLKLSCAASGFTFNTYAMNWVRQASGKGLEWVGRIRSKYNNYATYYADSVKDRFTISRDDSKSTLYLQMNSLKTEDTAVYYCVRHGNFGNSYVSWFAYWGQGTLVTVSSGGGGSGGGGSGGGGSGGGGSQAVVTQEPSLTVSPGGTVTLTCRSSTGAVTTSNYANWVQQKPGQAPRGLIGGTNKRAPWTPARFSGSLLGDKAALTLSGAQPEDEAEYFCALWYSNLWVFGGGTKLTVLGGGGSDKTHTCPPCPAPELLGGPSVFLFPPKPKDTLMISRTPEVTCVVVDVSHEDPEVKFNWYVDGVEVHNAKTKPREEQYASTYRVVSVLTVLHQDWLNGKEYKCKVSNKALPAPIEKTISKAKGQPREPQVYTLPPCREEMTKNQVSLWCLVKGFYPSDIAVEWESNGQPENNYKTTPPVLDSDGSFFLYSKLTVDKSRWQQGNVFSCSVMHEALHNHYTQKSLSLSPGKGGGGSGGGGSGGGGSGGGGSSQQIYGVVYGNVTFHVPSNVPLKEVLWKKQKDKVAELENSEFRAFSSFKNRVYLDTVSGSLTIYNLTSSDEDEYEMESPNITDTMKFFLYVLESLPSPTLTCALTNGSIEVQCMIPEHYNSHRGLIMYSWDCPMEQCKRNSTSIYFKMENDLPQKIQCTLSNPLFNTTSSIILTTCIPSSGHSRHR

SEQ ID NO: 753 - protein, 753 aa, Artificial Sequence
  Description of Artificial Sequence: Synthetic polypeptide
EVQLVESGGGLVQPGGSLKLSCAASGFTFNTYAMNWVRQASGKGLEWVGRIRSKYNNYATYYADSVKDRFTISRDDSKSTLYLQMNSLKTEDTAVYYCVRHGNFGNSYVSWFAYWGQGTLVTVSSGGGGSGGGGSGGGGSGGGGSQAVVTQEPSLTVSPGGTVTLTCRSSTGAVTTSNYANWVQQKPGQAPRGLIGGTNKRAPWTPARFSGSLLGDKAALTLSGAQPEDEAEYFCALWYSNLWVFGGGTKLTVLGGGGSDKTHTCPPCPAPELLGGPSVFLFPPKPKDTLMISRTPEVTCVVVAVSHEDPEVKFNWYVDGVEVHNAKTKPREEQYNSTYRVVSVLTVLHQDWLNGKEYKCKVSNKALAAPIEKTISKAKGQPREPQVYTLPPCREEMTKNQVSLWCLVKGFYPSDIAVEWESNGQPENNYKTTPPVLDSDGSFFLYSKLTVDKSRWQQGNVFSCSVMHEALHNHYTQKSLSLSPGKGGGGSGGGGSGGGGSGGGGSQVQLQESGPGLVKPSETLSLTCTVSGVSLPDYGVSWIRQPPGKGLEWIGVIWGSETTYYQSSLKSRVTISKDNSKNQVSLKLSSVTAADTAVYYCAKHYYYGGSYAMDYWGQGTLVTVSSGGGGSGGGGSGGGGSGGGGSEIVMTQSPATLSLSPGERATLSCRASQDISKYLNWYQQKPGQAPRLLIYHTSRLHSGIPARFSGSGSGTDYTLTISSLQPEDFAVYFCQQGNTLPYTFGQGTKLEIK

SEQ ID NO: 754 - protein, 325 aa, Artificial Sequence
  Description of Artificial Sequence: Synthetic polypeptide
SQQIYGVVYGNVTFHVPSNVPLKEVLWKKQKDKVAELENSEFRAFSSFKNRVYLDTVSGSLTIYNLTSSDEDEYEMESPNITDTMKFFLYVLESGGGSDKTHTCPPCPAPELLGGPSVFLFPPKPKDTLMISRTPEVTCVVVAVSHEDPEVKFNWYVDGVEVHNAKTKPREEQYGSTYRVVSVLTVLHQDWLNGKEYKCKVSNKALAAPIEKTISKAKGQPREPQVCTLPPSRDELTKNQVSLSCAVKGFYPSDIAVEWESNGQPENNYKTTPPVLDSDGSFFLVSKLTVDKSRWQQGNVFSCSVMHEALHNRYTQKSLSLSPGK

SEQ ID NO: 755 - protein, 729 aa, Artificial Sequence
  Description of Artificial Sequence: Synthetic polypeptide
EVQLVESGGGLVQPGGSLKLSCAASGFTFNTYAMNWVRQASGKGLEWVGRIRSKYNNYATYYADSVKDRFTISRDDSKSTLYLQMNSLKTEDTAVYYCVRHGNFGNSYVSWFAYWGQGTLVTVSSGGGGSGGGGSGGGGSGGGGSQAVVTQEPSLTVSPGGTVTLTCRSSTGAVTTSNYANWVQQKPGQAPRGLIGGTNKRAPWTPARFSGSLLGDKAALTLSGAQPEDEAEYFCALWYSNLWVFGGGTKLTVLGGGGSDKTHTCPPCPAPELLGGPSVFLFPPKPKDTLMISRTPEVTCVVVAVSHEDPEVKFNWYVDGVEVHNAKTKPREEQYNSTYRVVSVLTVLHQDWLNGKEYKCKVSNKALAAPIEKTISKAKGQPREPQVYTLPPCREEMTKNQVSLWCLVKGFYPSDIAVEWESNGQPENNYKTTPPVLDSDGSFFLYSKLTVDKSRWQQGNVFSCSVMHEALHNHYTQKSLSLSPGKGGGGSGGGGSGGGGSGGGGSQVQLQESGPGLVKPSETLSLTCTVSGVSLPDYGVSWIRQPPGKGLEWIGVIWGSETTYYQSSLKSRVTISKDNSKNQVSLKLSSVTAADTAVYYCAKHYYYGGSYAMDYWGQGTLVTVSSASTKGPSVFPLAPSSKSTSGGTAALGCLVKDYFPEPVTVSWNSGALTSGVHTFPAVLQSSGLYSLSSVVTVPSSSLGTQTYICNVNHKPSNTKVDKRVEPKSC

SEQ ID NO: 756 - protein, 450 aa, Artificial Sequence
  Description of Artificial Sequence: Synthetic polypeptide
QVQLQESGPGLVKPSETLSLTCTVSGVSLPDYGVSWIRQPPGKGLEWIGVIWGSETTYYQSSLKSRVTISKDNSKNQVSLKLSSVTAADTAVYYCAKHYYYGGSYAMDYWGQGTLVTVSSASTKGPSVFPLAPSSKSTSGGTAALGCLVKDYFPEPVTVSWNSGALTSGVHTFPAVLQSSGLYSLSSVVTVPSSSLGTQTYICNVNHKPSNTKVDKRVEPKSCDKTHTCPPCPAPELLGGPSVFLFPPKPKDTLMISRTPEVTCVVVAVSHEDPEVKFNWYVDGVEVHNAKTKPREEQYASTYRVVSVLTVLHQDWLNGKEYKCKVSNKALAAPIEKTISKAKGQPREPQVCTLPPSREEMTKNQVSLSCAVKGFYPSDIAVEWESNGQPENNYKTTPPVLDSDGSFFLVSKLTVDKSRWQQGNVFSCSVMHEALHNHYTQKSLSLSPGK

SEQ ID NO: 757 - protein, 10 aa, Artificial Sequence
  Description of Artificial Sequence: Synthetic peptide
GYKFTSYVMH

SEQ ID NO: 758 - protein, 17 aa, Artificial Sequence
  Description of Artificial Sequence: Synthetic peptide
YINPYNDVTKYNEKFKG

SEQ ID NO: 759 - protein, 5 aa, Artificial Sequence
  Description of Artificial Sequence: Synthetic peptide
SYVMH

SEQ ID NO: 760 - protein, 7 aa, Artificial Sequence
  Description of Artificial Sequence: Synthetic peptide
GYKFTSY

SEQ ID NO: 761 - protein, 6 aa, Artificial Sequence
  Description of Artificial Sequence: Synthetic peptide
NPYNDV

SEQ ID NO: 762 - protein, 8 aa, Artificial Sequence
  Description of Artificial Sequence: Synthetic peptide
GYKFTSYV

SEQ ID NO: 763 - protein, 8 aa, Artificial Sequence
  Description of Artificial Sequence: Synthetic peptide
INPYNDVT

SEQ ID NO: 764 - protein, 13 aa, Artificial Sequence
  Description of Artificial Sequence: Synthetic peptide
ARGSYYDYDGFVY

SEQ ID NO: 765 - protein, 6 aa, Artificial Sequence
  Description of Artificial Sequence: Synthetic peptide
TSSVSY

SEQ ID NO: 766 - protein, 5 aa, Artificial Sequence
  Description of Artificial Sequence: Synthetic peptide
SSVSY

SEQ ID NO: 767 - protein, 477 aa, Artificial Sequence
  Description of Artificial Sequence: Synthetic polypeptide
EVQLQQSGPELVKPGASVKMSCKASGYKFTSYVMHWVKQKPGQGLEWIGYINPYNDVTKYNEKFKGKATLTSDKSSSTAYMELSSLTSEDSAVHYCARGSYYDYDGFVYWGQGTLVTVSAGGGGSGGGGSGGGGSGGGGSQIVLTQSPAIMSASPGEKVTMTCSATSSVSYMHWYQQKSGTSPKRWIYDTSKLASGVPARFSGSGSGTSYSLTISSMEAEDAATYYCQQWSSNPLTFGAGTKLELKGGGSDKTHTCPPCPAPELLGGPSVFLFPPKPKDTLMISRTPEVTCVVVDVSHEDPEVKFNWYVDGVEVHNAKTKPREEQYASTYRVVSVLTVLHQDWLNGKEYKCKVSNKALPAPIEKTISKAKGQPREPQVYTLPPCREEMTKNQVSLWCLVKGFYPSDIAVEWESNGQPENNYKTTPPVLDSDGSFFLYSKLTVDKSRWQQGNVFSCSVMHEALHNHYTQKSLSLSPGK

SEQ ID NO: 768 - protein, 711 aa, Artificial Sequence
  Description of Artificial Sequence: Synthetic polypeptide
QVQLQESGPGLVKPSETLSLTCTVSGVSLPDYGVSWIRQPPGKGLEWIGVIWGSETTYYQSSLKSRVTISKDNSKNQVSLKLSSVTAADTAVYYCAKHYYYGGSYAMDYWGQGTLVTVSSASTKGPSVFPLAPSSKSTSGGTAALGCLVKDYFPEPVTVSWNSGALTSGVHTFPAVLQSSGLYSLSSVVTVPSSSLGTQTYICNVNHKPSNTKVDKRVEPKSCGGGGSGGGGSEVQLQQSGPELVKPGASVKMSCKASGYKFTSYVMHWVKQKPGQGLEWIGYINPYNDVTKYNEKFKGKATLTSDKSSSTAYMELSSLTSEDSAVHYCARGSYYDYDGFVYWGQGTLVTVSAGGGGSGGGGSGGGGSGGGGSQIVLTQSPAIMSASPGEKVTMTCSATSSVSYMHWYQQKSGTSPKRWIYDTSKLASGVPARFSGSGSGTSYSLTISSMEAEDAATYYCQQWSSNPLTFGAGTKLELKGGGGSDKTHTCPPCPAPELLGGPSVFLFPPKPKDTLMISRTPEVTCVVVAVSHEDPEVKFNWYVDGVEVHNAKTKPREEQYGSTYRVVSVLTVLHQDWLNGKEYKCKVSNKALAAPIEKTISKAKGQPREPQVCTLPPSRDELTKNQVSLSCAVKGFYPSDIAVEWESNGQPENNYKTTPPVLDSDGSFFLVSKLTVDKSRWQQGNVFSCSVMHEALHNHYTQKSLSLSPGK

SEQ ID NO: 769 - protein, 8 aa, Artificial Sequence
  Description of Artificial Sequence: Synthetic peptide
GYTFTRYT

SEQ ID NO: 770 - protein, 8 aa, Artificial Sequence
  Description of Artificial Sequence: Synthetic peptide
INPSRGYT

SEQ ID NO: 771 - protein, 12 aa, Artificial Sequence
  Description of Artificial Sequence: Synthetic peptide
ARYYDDHYSLDY

SEQ ID NO: 772 - protein, 477 aa, Artificial Sequence
  Description of Artificial Sequence: Synthetic polypeptide
QVQLVQSGGGVVQPGRSLRLSCKASGYTFTRYTMHWVRQAPGKGLEWIGYINPSRGYTNYNQKVKDRFTISRDNSKNTAFLQMDSLRPEDTGVYFCARYYDDHYSLDYWGQGTPVTVSSGGGGSGGGKSKKGGSGGGGSDIQMTQSPSSLSASVGDRVTITCSASSSVSYMNWYQQTPGKAPKRWIYDTSKLASGVPSRFSGSGSGTDYTFTISSLQPEDIATYYCQQWSSNPFTFGQGTKLQITGGGGSDKTHTCPPCPAPELLGGPSVFLFPPKPKDTLMISRTPEVTCVVVAVSHEDPEVKFNWYVDGVEVHNAKTKPREEQYASTYRVVSVLTVLHQDWLNGKEYKCKVSNKALAAPIEKTISKAKGQPREPQVYTLPPCREEMTKNQVSLWCLVKGFYPSDIAVEWESNGQPENNYKTTPPVLDSDGSFFLYSKLTVDKSRWQQGNVFSCSVMHEALHNHYTQKSLSLSPGK

SEQ ID NO: 773 - protein, 710 aa, Artificial Sequence
  Description of Artificial Sequence: Synthetic polypeptide
QVQLQESGPGLVKPSETLSLTCTVSGVSLPDYGVSWIRQPPGKGLEWIGVIWGSETTYYQSSLKSRVTISKDNSKNQVSLKLSSVTAADTAVYYCAKHYYYGGSYAMDYWGQGTLVTVSSASTKGPSVFPLAPSSKSTSGGTAALGCLVKDYFPEPVTVSWNSGALTSGVHTFPAVLQSSGLYSLSSVVTVPSSSLGTQTYICNVNHKPSNTKVDKRVEPKSCGGGGSGGGGSQVQLVQSGGGVVQPGRSLRLSCKASGYTFTRYTMHWVRQAPGKGLEWIGYINPSRGYTNYNQKVKDRFTISRDNSKNTAFLQMDSLRPEDTGVYFCARYYDDHYSLDYWGQGTPVTVSSGGGGSGGGGSGGGGSGGGGSDIQMTQSPSSLSASVGDRVTITCSASSSVSYMNWYQQTPGKAPKRWIYDTSKLASGVPSRFSGSGSGTDYTFTISSLQPEDIATYYCQQWSSNPFTFGQGTKLQITGGGGSDKTHTCPPCPAPELLGGPSVFLFPPKPKDTLMISRTPEVTCVVVAVSHEDPEVKFNWYVDGVEVHNAKTKPREEQYGSTYRVVSVLTVLHQDWLNGKEYKCKVSNKALAAPIEKTISKAKGQPREPQVCTLPPSRDELTKNQVSLSCAVKGFYPSDIAVEWESNGQPENNYKTTPPVLDSDGSFFLVSKLTVDKSRWQQGNVFSCSVMHEALHNHYTQKSLSLSPGK

SEQ ID NO: 774 - protein, 10 aa, Artificial Sequence
  Description of Artificial Sequence: Synthetic peptide
GFNIKDTYIH

SEQ ID NO: 775 - protein, 17 aa, Artificial Sequence
  Description of Artificial Sequence: Synthetic peptide
RIYPTNGYTRYADSVKG

SEQ ID NO: 776 - protein, 11 aa, Artificial Sequence
  Description of Artificial Sequence: Synthetic peptide
WGGDGFYAMDY

SEQ ID NO: 777 - protein, 5 aa, Artificial Sequence
  Description of Artificial Sequence: Synthetic peptide
DTYIH

SEQ ID NO: 778 - protein, 7 aa, Artificial Sequence
  Description of Artificial Sequence: Synthetic peptide
GFNIKDT

SEQ ID NO: 779 - protein, 6 aa, Artificial Sequence
  Description of Artificial Sequence: Synthetic peptide
YPTNGY

SEQ ID NO: 780 - protein, 8 aa, Artificial Sequence
  Description of Artificial Sequence: Synthetic peptide
GFNIKDTY

SEQ ID NO: 781 - protein, 8 aa, Artificial Sequence
  Description of Artificial Sequence: Synthetic peptide
IYPTNGYT

SEQ ID NO: 782 - protein, 13 aa, Artificial Sequence
  Description of Artificial Sequence: Synthetic peptide
SRWGGDGFYAMDY

SEQ ID NO: 783 - protein, 120 aa, Artificial Sequence [sequence omitted]

SEQ ID NO: 784 - protein, 11 aa, Artificial Sequence
  Description of Artificial Sequence: Synthetic peptide
RASQDVNTAVA

SEQ ID NO: 785 - protein, 7 aa, Artificial Sequence
  Description of Artificial Sequence: Synthetic peptide
SASFLYS

SEQ ID NO: 786 - protein, 9 aa, Artificial Sequence
  Description of Artificial Sequence: Synthetic peptide
QQHYTTPPT

SEQ ID NO: 787 - protein, 6 aa, Artificial Sequence
  Description of Artificial Sequence: Synthetic peptide
HYTTPP

SEQ ID NO: 788 - protein, 6 aa, Artificial Sequence
  Description of Artificial Sequence: Synthetic peptide
QDVNTA

SEQ ID NO: 789 - protein, 107 aa, Artificial Sequence [sequence omitted]

SEQ ID NO: 790 - protein, 214 aa, Artificial Sequence
  Description of Artificial Sequence: Synthetic polypeptide
DIQMTQSPSSLSASVGDRVTITCRASQDVNTAVAWYQQKPGKAPKLLIYSASFLYSGVPSRFSGSRSGTDFTLTISSLQPEDFATYYCQQHYTTPPTFGQGTKVEIKRTVAAPSVFIFPPSDEQLKSGTASVVCLLNNFYPREAKVQWKVDNALQSGNSQESVTEQDSKDSTYSLSSTLTLSKADYEKHKVYACEVTHQGLSSPVTKSFNRGEC

SEQ ID NO: 791 - protein, 450 aa, Artificial Sequence
  Description of Artificial Sequence: Synthetic polypeptide
EVQLVESGGGLVQPGGSLRLSCAASGFNIKDTYIHWVRQAPGKGLEWVARIYPTNGYTRYADSVKGRFTISADTSKNTAYLQMNSLRAEDTAVYYCSRWGGDGFYAMDYWGQGTLVTVSSASTKGPSVFPLAPSSKSTSGGTAALGCLVKDYFPEPVTVSWNSGALTSGVHTFPAVLQSSGLYSLSSVVTVPSSSLGTQTYICNVNHKPSNTKVDKRVEPKSCDKTHTCPPCPAPELLGGPSVFLFPPKPKDTLMISRTPEVTCVVVAVSHEDPEVKFNWYVDGVEVHNAKTKPREEQYASTYRVVSVLTVLHQDWLNGKEYKCKVSNKALAAPIEKTISKAKGQPREPQVCTLPPSREEMTKNQVSLSCAVKGFYPSDIAVEWESNGQPENNYKTTPPVLDSDGSFFLVSKLTVDKSRWQQGNVFSCSVMHEALHNHYTQKSLSLSPGK

SEQ ID NO: 792 - protein, 486 aa, Artificial Sequence
  Description of Artificial Sequence: Synthetic polypeptide
EVQLVESGGGLVQPGGSLKLSCAASGFTFNTYAMNWVRQASGKGLEWVGRIRSKYNNYATYYADSVKDRFTISRDDSKSTLYLQMNSLKTEDTAVYYCVRHGNFGNSYVSWFAYWGQGTLVTVSSGGGGSGGGGSGGGGSGGGGSQAVVTQEPSLTVSPGGTVTLTCRSSTGAVTTSNYANWVQQKPGQAPRGLIGGTNKRAPWTPARFSGSLLGDKAALTLSGAQPEDEAEYFCALWYSNLWVFGGGTKLTVLGGGGSDKTHTCPPCPAPELLGGPSVFLFPPKPKDTLMISRTPEVTCVVVAVSHEDPEVKFNWYVDGVEVHNAKTKPREEQYASTYRVVSVLTVLHQDWLNGKEYKCKVSNKALAAPIEKTISKAKGQPREPQVYTLPPCREEMTKNQVSLWCLVKGFYPSDIAVEWESNGQPENNYKTTPPVLDSDGSFFLYSKLTVDKSRWQQGNVFSCSVMHEALHNRYTQKSLSLSPGK

SEQ ID NO: 793 - protein, 719 aa, Artificial Sequence
  Description of Artificial Sequence: Synthetic polypeptide
EVQLVESGGGLVQPGGSLRLSCAASGFNIKDTYIHWVRQAPGKGLEWVARIYPTNGYTRYADSVKGRFTISADTSKNTAYLQMNSLRAEDTAVYYCSRWGGDGFYAMDYWGQGTLVTVSSASTKGPSVFPLAPSSKSTSGGTAALGCLVKDYFPEPVTVSWNSGALTSGVHTFPAVLQSSGLYSLSSVVTVPSSSLGTQTYICNVNHKPSNTKVDKRVEPKSCGGGGSGGGGSEVQLVESGGGLVQPGGSLKLSCAASGFTFNTYAMNWVRQASGKGLEWVGRIRSKYNNYATYYADSVKDRFTISRDDSKSTLYLQMNSLKTEDTAVYYCVRHGNFGNSYVSWFAYWGQGTLVTVSSGGGGSGGGGSGGGGSGGGGSQAVVTQEPSLTVSPGGTVTLTCRSSTGAVTTSNYANWVQQKPGQAPRGLIGGTNKRAPWTPARFSGSLLGDKAALTLSGAQPEDEAEYFCALWYSNLWVFGGGTKLTVLGGGGSDKTHTCPPCPAPELLGGPSVFLFPPKPKDTLMISRTPEVTCVVVAVSHEDPEVKFNWYVDGVEVHNAKTKPREEQYASTYRVVSVLTVLHQDWLNGKEYKCKVSNKALAAPIEKTISKAKGQPREPQVCTLPPSREEMTKNQVSLSCAVKGFYPSDIAVEWESNGQPENNYKTTPPVLDSDGSFFLVSKLTVDKSRWQQGNVFSCSVMHEALHNHYTQKSLSLSPGK

SEQ ID NO: 794 - protein, 10 aa, Artificial Sequence
  Description of Artificial Sequence: Synthetic peptide
GYTFTDYYMH

SEQ ID NO: 795 - protein, 17 aa, Artificial Sequence
  Description of Artificial Sequence: Synthetic peptide
WINPNSGGTNYAQKFQG

SEQ ID NO: 796 - protein, 6 aa, Artificial Sequence
  Description of Artificial Sequence: Synthetic peptide
GWDFDY

SEQ ID NO: 797 - protein, 5 aa, Artificial Sequence
  Description of Artificial Sequence: Synthetic peptide
DYYMH

SEQ ID NO: 798 - protein, 6 aa, Artificial Sequence
  Description of Artificial Sequence: Synthetic peptide
NPNSGG

SEQ ID NO: 799 - protein, 8 aa, Artificial Sequence
  Description of Artificial Sequence: Synthetic peptide
GYTFTDYY

SEQ ID NO: 800 - protein, 8 aa, Artificial Sequence
  Description of Artificial Sequence: Synthetic peptide
INPNSGGT

SEQ ID NO: 801 - protein, 8 aa, Artificial Sequence
  Description of Artificial Sequence: Synthetic peptide
ASGWDFDY

SEQ ID NO: 802 - protein, 115 aa, Artificial Sequence
  Description of Artificial Sequence: Synthetic polypeptide
QVQLVQSGAEVEKPGASVKVSCKASGYTFTDYYMHWVRQAPGQGLEWMGWINPNSGGTNYAQKFQGRVTMTRDTSISTAYMELSRLRSDDTAVYYCASGWDFDYWGQGTLVTVSS

SEQ ID NO: 803 - protein, 11 aa, Artificial Sequence
  Description of Artificial Sequence: Synthetic peptide
RASQSIRYYLS

SEQ ID NO: 804 - protein, 7 aa, Artificial Sequence
  Description of Artificial Sequence: Synthetic peptide
TASILQN

SEQ ID NO: 805 - protein, 8 aa, Artificial Sequence
  Description of Artificial Sequence: Synthetic peptide
LQTYTTPD

SEQ ID NO: 806 - protein, 7 aa, Artificial Sequence
  Description of Artificial Sequence: Synthetic peptide
SQSIRYY

SEQ ID NO: 807 - protein, 3 aa, Artificial Sequence
  Description of Artificial Sequence: Synthetic peptide
TAS

SEQ ID NO: 808 - protein, 5 aa, Artificial Sequence
  Description of Artificial Sequence: Synthetic peptide
TYTTP

SEQ ID NO: 809 - protein, 6 aa, Artificial Sequence
  Description of Artificial Sequence: Synthetic peptide
QSIRYY

SEQ ID NO: 810 - protein, 10 aa, Artificial Sequence
  Description of Artificial Sequence: Synthetic peptide
TASILQNGVP

SEQ ID NO: 811 - protein, 106 aa, Artificial Sequence
  Description of Artificial Sequence: Synthetic polypeptide
DIVMTQSPSSLSASVGDRVTITCRASQSIRYYLSWYQQKPGKAPKLLIYTASILQNGVPSRFSGSGSGTDFTLTISSLQPEDFATYYCLQTYTTPDFGPGTKVEIK

SEQ ID NO: 812 - protein, 213 aa, Artificial Sequence
  Description of Artificial Sequence: Synthetic polypeptide
DIVMTQSPSSLSASVGDRVTITCRASQSIRYYLSWYQQKPGKAPKLLIYTASILQNGVPSRFSGSGSGTDFTLTISSLQPEDFATYYCLQTYTTPDFGPGTKVEIKRTVAAPSVFIFPPSDEQLKSGTASVVCLLNNFYPREAKVQWKVDNALQSGNSQESVTEQDSKDSTYSLSSTLTLSKADYEKHKVYACEVTHQGLSSPVTKSFNRGEC

SEQ ID NO: 813 - protein, 445 aa, Artificial Sequence
  Description of Artificial Sequence: Synthetic polypeptide
QVQLVQSGAEVEKPGASVKVSCKASGYTFTDYYMHWVRQAPGQGLEWMGWINPNSGGTNYAQKFQGRVTMTRDTSISTAYMELSRLRSDDTAVYYCASGWDFDYWGQGTLVTVSSASTKGPSVFPLAPSSKSTSGGTAALGCLVKDYFPEPVTVSWNSGALTSGVHTFPAVLQSSGLYSLSSVVTVPSSSLGTQTYICNVNHKPSNTKVDKRVEPKSCDKTHTCPPCPAPELLGGPSVFLFPPKPKDTLMISRTPEVTCVVVAVSHEDPEVKFNWYVDGVEVHNAKTKPREEQYASTYRVVSVLTVLHQDWLNGKEYKCKVSNKALAAPIEKTISKAKGQPREPQVCTLPPSREEMTKNQVSLSCAVKGFYPSDIAVEWESNGQPENNYKTTPPVLDSDGSFFLVSKLTVDKSRWQQGNVFSCSVMHEALHNHYTQKSLSLSPGK

SEQ ID NO: 814 - protein, 714 aa, Artificial Sequence
  Description of Artificial Sequence: Synthetic polypeptide
QVQLVQSGAEVEKPGASVKVSCKASGYTFTDYYMHWVRQAPGQGLEWMGWINPNSGGTNYAQKFQGRVTMTRDTSISTAYMELSRLRSDDTAVYYCASGWDFDYWGQGTLVTVSSASTKGPSVFPLAPSSKSTSGGTAALGCLVKDYFPEPVTVSWNSGALTSGVHTFPAVLQSSGLYSLSSVVTVPSSSLGTQTYICNVNHKPSNTKVDKRVEPKSCGGGGSGGGGSEVQLVESGGGLVQPGGSLKLSCAASGFTFNTYAMNWVRQASGKGLEWVGRIRSKYNNYATYYADSVKDRFTISRDDSKSTLYLQMNSLKTEDTAVYYCVRHGNFGNSYVSWFAYWGQGTLVTVSSGGGGSGGGGSGGGGSGGGGSQAVVTQEPSLTVSPGGTVTLTCRSSTGAVTTSNYANWVQQKPGQAPRGLIGGTNKRAPWTPARFSGSLLGDKAALTLSGAQPEDEAEYFCALWYSNLWVFGGGTKLTVLGGGGSDKTHTCPPCPAPELLGGPSVFLFPPKPKDTLMISRTPEVTCVVVAVSHEDPEVKFNWYVDGVEVHNAKTKPREEQYGSTYRVVSVLTVLHQDWLNGKEYKCKVSNKALAAPIEKTISKAKGQPREPQVCTLPPSRDELTKNQVSLSCAVKGFYPSDIAVEWESNGQPENNYKTTPPVLDSDGSFFLVSKLTVDKSRWQQGNVFSCSVMHEALHNHYTQKSLSLSPGK

SEQ ID NO: 815 - protein, 194 aa, Homo sapiens
QGHLVHMTVVSGSNVTLNISESLPENYKQLTWFYTFDQKIVEWDSRKSKYFESKFKGRVRLDPQSGALYISKVQKEDNSTYIMRVLKKTGNEQEWKIKLQVLDPVPKPVIKIEKIEDMDDNCYLKLSCVIPGESVNYTWYGDKRPFPKELQNSVLETTLMPHNYSRCYTCQVSNSVSSKNGTVCLSPPCTLARS

SEQ ID NO: 816 - protein, 425 aa, Artificial Sequence
  Description of Artificial Sequence: Synthetic polypeptide
QGHLVHMTVVSGSNVTLNISESLPENYKQLTWFYTFDQKIVEWDSRKSKYFESKFKGRVRLDPQSGALYISKVQKEDNSTYIMRVLKKTGNEQEWKIKLQVLDPVPKPVIKIEKIEDMDDNCYLKLSCVIPGESVNYTWYGDKRPFPKELQNSVLETTLMPHNYSRCYTCQVSNSVSSKNGTVCLSPPCTLARSGGGSDKTHTCPPCPAPELLGGPSVFLFPPKPKDTLMISRTPEVTCVVVDVSHEDPEVKFNWYVDGVEVHNAKTKPREEQYASTYRVVSVLTVLHQDWLNGKEYKCKVSNKALPAPIEKTISKAKGQPREPQVYTLPPCREEMTKNQVSLWCLVKGFYPSDIAVEWESNGQPENNYKTTPPVLDSDGSFFLYSKLTVDKSRWQQGNVFSCSVMHEALHNRYTQKSLSLSPGK
